United States Patent Application Publication US 2024/0327476 A1 - sequence listing, part 132

SEQ ID NO: 250710 - DNA, 1506 bp, synthetic construct
  misc_feature 1..1506: note = Description of Artificial Sequence: Synthetic coding sequence
  source 1..1506: mol_type = other DNA
atgagctgcccagtcccagcctgttgtgccctgctgctcgtcctgggcctttgtagggctagaccccgcaacgcactccttcttcttgcggatgacggaggatttgaatcgggtgcatacaacaactcagcaattgctactccacatctggatgcattggcacgccgctccctgttgttcagaaatgcgtttacctcggtgtcctcgtgctctccttctcgggcctcgctgcttaccggactccctcaacatcagaatggcatgtacgggctccaccaggatgtgcatcactttaactcatttgacaaggtccggtcgctgcctctgctgctgagccaggccggagtgcgaaccggaatcattggtaagaagcatgttgggccagaaactgtgtacccctttgattttgcatataccgaagaaaatggatccgtccttcaagtgggtcgcaatatcactcgcattaagttgctggtccggaaatttctccagactcaggatgatcgacccttcttcttgtacgtggcattccacgatccacacaggtgtggccactcgcaacctcaatacgggaccttttgtgaaaagtttggaaacggcgaaagcggtatggggcgtattccagattggaccccgcaagcatacgacccgctggatgtgctggtgccgtacttcgtccctaacacgcccgctgcacgagccgacctcgccgcccagtataccactgtgggtagaatggatcagggagtgggactcgttctgcaagaactccgtgatgcgggcgtccttaacgataccctggtgatattcacctcagataacggcatcccatttccatcagggagaactaatctttactggcccgggactgcggagcctctccttgtgtcgagccctgagcatccgaaacgatggggtcaggtgtcagaagcgtatgtttccctgctcgacctgactcctaccattcttgattggttttccattccatacccttcatacgcaatcttcggatccaaaactatacatcttaccgggagatctcttctgcccgctctggaagcagagccattgtgggcaactgtgttcggatctcaatcgcatcacgaagtgactatgtcctacccaatgagatcggtgcagcacagacattttagactcgtgcataaccttaacttcaaaatgccatttcctatcgatcaggacttttacgtctcacctaccttccaagacttgcttaaccgtaccaccgcaggccagcctactggttggtacaaggatctccggcattactactaccgggcacggtgggagctgtacgaccgctcgagggacccccacgagactcaaaatcttgcaaccgatccaagatttgcacaactcctcgagatgctgcgggaccaattggccaagtggcagtgggaaacccatgatccgtgggtgtgcgcgccggacggcgtgttggaagaaaagttgtcgcctcagtgtcaaccgttgcacaatgagctt

SEQ ID NO: 250711 - DNA, 1506 bp, synthetic construct
  misc_feature 1..1506: note = Description of Artificial Sequence: Synthetic coding sequence
  source 1..1506: mol_type = other DNA
atgtcgtgccccgtccccgcgtgctgtgctctgttactcgttctgggtctttgccgcgcacgccctcgtaatgcgctcctgttgctggctgacgatggaggcttcgaatctggtgcctataataactccgcgattgcgacgccccatcttgatgcactcgcccgccgctcgcttttattccgaaacgctttcacctccgtctcgtcttgttcaccgtcccgcgcctcgctccttacaggtttaccacaacatcaaaacggcatgtacgggctccaccaggatgtgcatcattttaacagttttgataaagtcaggtctcttcctctcctgctatcacaggcgggtgtccggacgggcatcatcggcaaaaagcacgtgggccctgagacagtctatccgtttgatttcgcatacaccgaagagaacggcagtgtcctacaggttggtcgaaacatcacacgtattaagttgttggtacgcaaatttttgcagacccaggacgaccgaccgttcttcctgtacgtcgcgtttcacgatccgcatcgatgtggtcacagtcagcctcagtatggaactttctgtgaaaagttcggaaacggagaaagcggcatggggaggataccagactggactcctcaagcctacgacccgcttgatgttcttgtgccctacttcgtccccaatactcctgcagcacgggcagatctggccgcccagtataccactgtcggccgaatggatcagggtgttggactggtgctccaagagctccgagacgcaggagttcttaacgacacacttgttatctttactagtgacaacggaattccgtttccttcaggacgtacaaatctttattggcctgggacagcggaacccttgttggtgagcagcccagaacatcccaagagatggggacaggttagcgaggcgtatgtgagcctccttgaccttacaccgaccatcctcgactggttctccatcccgtatccctcgtatgccatcttcggttcaaagaccatccatcttacagggcgtagtctgttaccggccctcgaggcggaacctttgtgggcaacagtttttggcagccagtcacatcacgaggtcacaatgagttatcctatgcggtccgtgcaacaccgtcatttcagacttgtccataaccttaactttaaaatgcccttccctatcgatcaggacttttacgtttcgcctactttccaggacttgttgaaccgtacaacagcgggccagccaaccggatggtacaaggatctacgacattattattatcgagcacgctgggaattgtacgatcgttcccgggatccgcatgagacacaaaacctcgcgaccgaccctcgctttgctcagttgctggagatgctgcgagaccaactggctaaatggcaatgggagactcatgatccctgggtgtgtgcccctgatggcgtgctagaagagaagctgagtcctcaatgtcaacctttacataatgagttg

SEQ ID NO: 250712 - DNA, 1506 bp, synthetic construct
  misc_feature 1..1506: note = Description of Artificial Sequence: Synthetic coding sequence
  source 1..1506: mol_type = other DNA
atgtcttgccccgtaccagcttgttgcgcactgctgctggtgctggggctttgtagggcacgaccacgaaatgcgttgctgctgcttgctgacgatggagggttcgaatctggcgcttacaacaatagtgcaatcgccacaccacatctcgatgctctcgctagaaggtccctgcttttccgtaacgcctttacctccgtatcctcatgtagcccatccagggcttccctcctcaccgggttaccacagcatcagaatgggatgtacggcctgcaccaggatgtacaccatttcaactcctttgataaggtgaggagtttgccactactgctctcacaggcgggtgtgaggactggcattattggaaaaaagcatgtgggcccagagacagtgtacccattcgactttgcctatacagaggagaatggctctgtgctgcaggtcggccgaaatataacacgcatcaagcttcttgtcaggaagttcctgcagactcaggatgatcgaccttttttcttgtacgtggcctttcacgacccgcaccggtgtggacattcacaaccgcagtatggcactttttgtgagaaatttgggaacggcgaaagcggcatgggcagaatacctgattggacgccccaggcatacgaccccctggatgtcctcgtgccgtactttgtgcctaatacaccagccgcccgggccgacctggctgcccagtacaccaccgtgggcagaatggaccagggcgttggcctagtcctgcaggagctccgggatgcgggggttttgaatgatacacttgttatcttcacctcagataacggaataccgttcccttccggcagaacgaatctctattggccgggtaccgcagaaccgctgctcgtgtcctcacctgaacaccctaaaaggtggggccaagtgagcgaagcttacgtgtcgctccttgacttgacccctacaatcctggactggttttcaatcccatacccctcgtatgctatctttggctccaagactattcatcttaccggaaggagcctgctaccagcacttgaagctgaacccctgtgggccacagtatttggatctcagagccaccacgaggttacaatgagctacccaatgaggtctgtgcagcaccgacacttcaggttagtccacaacctgaattttaaaatgccattcccaatagaccaggatttttacgtgagccctacatttcaggacttgctgaaccggaccacagcaggccagccaaccggctggtacaaagaccttcgtcattactattaccgggccaggtgggaactgtatgatcggagtcgggacccacacgagacacagaacctcgcaaccgatcctcggtttgctcagcttctggaaatgcttagggaccagcttgccaaatggcagtgggagacacacgacccttgggtgtgtgctccagatggagtgttggaggaaaagctgtctcctcagtgccagccacttcacaacgagctg

SEQ ID NO: 250713 - DNA, 1506 bp, synthetic construct
  misc_feature 1..1506: note = Description of Artificial Sequence: Synthetic coding sequence
  source 1..1506: mol_type = other DNA
atgtcttgccccgttccagcatgctgcgctctgctcctggtcctgggcctgtgtcgcgcacgcccaagaaacgctttgcttttgctagctgacgacggcgggttcgagagcggagcatacaataactccgcaatcgccacaccccacctcgacgccctggctcgcagatcactcttatttaggaatgcttttacgtccgtatcctcatgctcccctagccgcgcatccttattgactggcctgccgcagcaccagaacggcatgtacggtctccatcaagacgtccaccactttaatagttttgataaggtgcggtccttgcccttactgctctcccaggctggtgtcaggacaggcatcattgggaagaaacacgttggccctgaaactgtctaccccttcgatttcgcctacactgaagagaacggcagtgtgttgcaggtgggaagaaacatcaccaggattaagctactggttaggaaattcttgcagacccaggatgatcgtccattctttctgtatgtggcgttccacgatcctcatcggtgcggccattctcagccgcagtatggtaccttctgcgagaaattcggtaatggggaatcaggtatgggccgaatccctgattggactccccaggcttacgatcccctggacgtgttagtcccctactttgtacccaatactcctgcagctagagcagacctggccgcgcagtataccacagtcggcaggatggaccagggcgttgggttggtgctgcaggagctgcgagatgctggcgtgttgaacgacactctcgtcatctttactagcgacaacggcatccctttcccctctggccgaaccaacctgtactggccagggaccgcggagcccttactggtgagctcccctgaacaccctaagcgctggggtcaggtttccgaagcctatgtgagcctgctggacctgactccgactattctggattggtttagcataccttatccttcatacgctatctttgggtctaaaacaatacatttgacgggcagatccctgttgccagcattggaggctgagccactgtgggctaccgtgttcggttcgcagagccaccatgaagtgaccatgagctaccccatgaggtctgtccaacaccgacatttccgtttggtgcataacctgaacttcaaaatgcccttccctatcgatcaggatttctatgttagccccacattccaggacctgttgaatcggaccacagctggtcagccgacgggttggtacaaggaccttaggcactactactatagggcccggtgggagctgtatgaccgctctcgggatccacatgaaacgcaaaacctcgcgactgatccccgctttgcccagctcctggaaatgttaagggatcagctggccaagtggcagtgggagacgcacgatccatgggtctgtgcaccggatggcgtgcttgaggagaaattgtcccctcagtgccaaccgcttcataatgagctg

SEQ ID NO: 250714 - DNA, 1506 bp, synthetic construct
  misc_feature 1..1506: note = Description of Artificial Sequence: Synthetic coding sequence
  source 1..1506: mol_type = other DNA
atgtcctgtccggtgcccgcctgctgcgcacttctgctggtgctggggctctgtcgcgcacggccacgcaacgctcttctgttactcgcagatgacgggggtttcgagtctggggcttacaataattccgctattgcgacgccccatctggatgctctggccagacgaagcttattgttcagaaatgccttcacttcggtgtcaagctgctccccttctcgggcttctctcctgacgggattgcctcagcatcagaatggcatgtacggactacatcaggacgttcaccactttaattcttttgacaaagtgcgcagtctccccttgttactctcacaggcgggtgtccgtacaggcatcattggaaagaagcatgtgggccccgaaacagtgtacccctttgatttcgcgtacacggaggagaatggatcggtgttgcaggtcgggcgcaatattactagaattaagctgctggtgcggaagttcctccagacccaggacgaccgcccgtttttcctgtatgtggcctttcacgacccccaccgttgtgggcactcccagccacagtacggaacattttgcgagaagtttgggaacggagagtctgggatggggaggattccagattggactccgcaggcatatgaccccttagatgtgctggtgccctacttcgtgccgaataccccagcagccagggccgacctggccgcccagtatactaccgtgggcaggatggatcagggcgtgggcttggtgcttcaggaactgcgggacgcaggcgtgctgaacgacacattggtcatattcactagcgacaacggaataccttttcccagcggccgcaccaacctatattggccagggaccgccgaaccactactggtgagcagccctgaacaccccaaaaggtggggccaggtcagcgaagcctatgtgtccctgctcgatcttacgccaactatactagattggttctctatcccatatccaagctatgctatcttcggctccaagaccatacacctgactggcagatcactcctgcccgccttggaggccgaacccctctgggcaaccgtatttggctcccagagccaccatgaagtgaccatgtcatatccgatgcggtcagtgcaacacaggcattttcgccttgtccataacttaaacttcaaaatgccgtttcccatagatcaggacttctacgttagcccaacatttcaagatctcctgaacagaacgacagcaggccagcccaccggctggtacaaagatctccgtcactactattaccgagcgcgctgggaattgtacgataggtcaagagatccccacgagacgcaaaacctagctactgacccacggtttgcccaactgctggagatgcttagagatcaactggcgaagtggcagtgggaaactcatgacccctgggtgtgcgcccccgatggagttctggaggaaaaattatccccccaatgtcagcctctacataatgagctg

SEQ ID NO: 250715 - DNA, 1506 bp, synthetic construct
  misc_feature 1..1506: note = Description of Artificial Sequence: Synthetic coding sequence
  source 1..1506: mol_type = other DNA
atgagttgccctgttcctgcgtgttgtgccctcctgcttgtgttgggcctctgcagggctcggcctaggaacgctttgctccttctcgccgacgatggggggtttgaatctggtgcctacaacaactctgctatcgcgaccccccacctagacgccctggcccgccgcagcttgctgtttagaaacgcattcaccagcgtatcctcttgcagtccttcaagggcatcacttcttacaggactcccccagcatcagaacggtatgtacgggctgcatcaggacgtccaccacttcaactcttttgataaggtccggtccctccctctgttgctgtctcaagcaggagtcaggactggcattatcggcaaaaaacacgtcgggcctgaaacggtatacccctttgacttcgcttacactgaggagaatggttcagtgctacaagtgggtcggaatatcacaagaataaagctgttagtgcggaaatttcttcaaacgcaggatgatcgtccattctttctctacgtggcgttccacgacccacacaggtgcggccacagtcaacctcaatatgggaccttctgcgagaaatttggcaacggagagtctgggatgggcaggattccggattggaccccccaggcgtacgatccgctcgatgtcctggtcccttactttgttcccaacactcccgccgcaagggccgatcttgctgcacagtacacaaccgtgggccggatggatcagggcgtggggctcgtccttcaggaacttcgcgacgccggagtgctgaacgacaccctggtgatttttacatctgataacggaataccgttccccagtggccgaacaaatctgtactggcccgggacggctgagcctctcctggttagcagcccggagcatcccaaacgatggggacaggtgagtgaagcctatgtgtcattgctggacctaactccaacaatcctggactggttcagtataccctatccctcctatgccattttcggaagcaaaactatccatttgacaggtagaagtctgctgcccgccctcgaggccgaacctctgtgggcgaccgtgtttggcagccagagccaccacgaagtaactatgtcctaccctatgcggtcggtgcaacatagacactttcggcttgtgcacaatctaaacttcaaaatgcctttcccaattgaccaggatttttatgttagcccgacctttcaagatctccttaaccgtacaaccgcaggtcaacccaccggttggtacaaggatcttcgccattattattatagagcacgctgggagttgtatgataggtccagggatccccacgagactcaaaacctggctactgaccctagattcgcccagctcctggagatgctgcgggatcagctcgcgaagtggcagtgggagactcacgatccctgggtctgcgcacctgatggtgtgctcgaagagaaattgtcaccgcagtgtcagcctcttcacaacgagctg

SEQ ID NO: 250716 - DNA, 1506 bp, synthetic construct
  misc_feature 1..1506: note = Description of Artificial Sequence: Synthetic coding sequence
  source 1..1506: mol_type = other DNA
atgtcatgccctgtgcctgcttgttgcgcactgctgctggtgctcggactgtgtagagcaagacctcgtaatgccctgctcttgctggcagatgatggcgggttcgagagtggggcatacaataactctgcaattgcaacccctcatctggacgcccttgctaggaggtcacttctgttccggaatgcatttacctccgtgtcatcgtgctccccatcccgtgcctcgctgcttacgggactgccgcaacaccaaaacggaatgtacgggcttcatcaggacgtccatcactttaactcttttgacaaggtcagatctctgccccttcttctttcccaggcgggtgtccggaccggaataatcggtaaaaagcatgtcggtccggaaactgtgtacccattcgatttcgcatacaccgaagaaaacggatccgtccttcaggtgggacgcaacattactcgcataaagctgctggtgagaaagtttctgcagacccaagatgatagaccttttttcctttacgtcgccttccacgatccccatagatgtggtcacagccaaccacaatacggtaccttttgtgagaaattcggaaatggcgaatcgggtatgggccgaatccccgactggactcctcaggcctacgatccacttgatgtcttggttccttatttcgtgccaaataccccggcagctcgtgctgatcttgccgcacaatacactactgtcggacggatggaccaaggagtggggctggttttgcaggaactgagagatgcaggggtcctcaacgatacgctggtcatattcacgtcggataacggaatcccgttcccatcgggtaggacgaatctgtactggcccggcaccgccgaacctctccttgtgtcgagcccggaacatcctaagcgatggggtcaagtgtcagaagcatacgtgtcgctgctcgatctcactcctactattcttgattggttttccattccttatccctcttacgcaattttcggatcgaaaaccattcatcttaccggtcgcagtttgcttccagccctggaagccgaacctctgtgggccacggtgtttggatcacaatcacatcacgaggtcaccatgtcgtaccccatgcggtccgtccaacatagacatttcagacttgtccataatctcaatttcaagatgccatttcccattgatcaggacttttacgtgtcccctacttttcaggacctgctgaacaggaccaccgcaggccagccaactggttggtataaggatcttaggcactactactacagagcgcgctgggagctgtacgataggtcaagagatccacacgagacgcagaacctggcaaccgatccccgcttcgcgcaactgcttgaaatgcttcgagatcaactcgcaaaatggcaatgggagactcatgatccatgggtctgtgcacctgacggcgtgctggaagagaagctctcgcctcaatgtcagcctctccataatgagctg

SEQ ID NO: 250717 - DNA, 1506 bp, synthetic construct
  misc_feature 1..1506: note = Description of Artificial Sequence: Synthetic coding sequence
  source 1..1506: mol_type = other DNA
atgtcgtgccccgttcctgcatgttgcgcgttgctgctggtgctgggactctgcagagcccgccccagaaacgctctgttgcttttggcggacgatggaggcttcgagtcaggggcctacaacaactcggcaattgcgacgccacatctcgacgccctcgcgcgacgctctttgctcttccgaaacgcctttacctcggtgtcgtcctgttccccttcccgcgccagcctcctgaccggcctgccccagcatcaaaatggaatgtatggactgcatcaggacgtgcaccacttcaacagcttcgataaggtgagatcgctcccactgctgctgtcgcaggctggagtccgcaccggaatcatcggcaagaaacacgttggtccagaaactgtctaccccttcgatttcgcgtacacggaggaaaacggatcagtgctgcaggtgggtcggaatatcaccagaatcaaactgctggtccggaaatttctgcaaacccaggacgaccgtccgttcttcctgtacgtggctttccatgatccgcatcggtgcggccattcgcagccacaatacggtactttctgtgaaaagttcgggaacggagagtcagggatgggacgcattcccgactggacccctcaagcctacgatcccttggatgtcctggtcccgtacttcgtgcccaacactcctgcggcgagagccgatctcgcggcacagtacactaccgttggccgcatggaccagggcgtgggtttggtccttcaagaactgcgggacgctggagtgctcaacgatacgctcgtgatctttacctcagataatggaatcccgttcccgagcggccggactaatctgtactggcccgggactgccgagcctttgttggttagctcgccggagcatccaaagagatggggacaggtgtcagaagcatatgtgagcttgctcgacctgacccctactatcctggattggttttcaattccatacccaagctacgccatcttcgggtccaagaccatccatctcactggacgtagcctgctgcctgcgctcgaggccgaaccgctctgggcgaccgtgttcggatcgcagtcccaccacgaagtgaccatgtcatacccgatgaggagcgtgcagcaccgccacttccggttggtgcacaatctgaactttaagatgccgtttccgatcgatcaagacttttacgtctcaccgacgtttcaggatctgctcaaccgcaccactgcggggcagccgactggatggtacaaagacctgagacactactactaccgcgcccggtgggagctgtacgaccgctcccgggacccgcacgaaacccaaaacctcgctaccgaccctcggttcgcgcaactgctggaaatgttgcgcgatcaactcgcaaagtggcagtgggaaactcatgacccgtgggtgtgcgcgccagacggagtgctggaggaaaagctgtcgccacagtgtcagccgctgcataatgagctg

SEQ ID NO: 250718 - DNA, 1506 bp, synthetic construct
  misc_feature 1..1506: note = Description of Artificial Sequence: Synthetic coding sequence
  source 1..1506: mol_type = other DNA
atgagctgcccggtcccggcttgctgcgctctcttgctggtcctggggctgtgtagggcacggccccgcaacgcgctcttgctgctcgccgacgatggaggtttcgagagcggcgcctataacaattctgctatagcgactccgcatctcgacgccctcgcgcggcgcagtctgctgttccgcaatgctttcacttccgtatcgagctgttccccatctcgagccagcctcctgaccggactgccccagcatcagaacggcatgtatggactgcaccaggacgtgcatcatttcaacagctttgacaaggtgcgctcactgccgttgctcctctcacaagccggagtgcgcactggcattattgggaagaaacacgtcggcccggagactgtctacccgtttgacttcgcctacactgaagaaaatgggtccgttcttcaggtgggacgtaatatcacccggatcaagctgctggtgaggaaatttctgcaaactcaggatgatcgcccattcttcctgtacgtggcattccacgacccgcatagatgtggacattcccagcctcaatacggtaccttctgcgaaaagttcggaaacggagaaagcggcatgggcaggatcccggattggaccccgcaggcgtacgacccactggacgtgctggtgccttacttcgtgcctaacacccccgcagccagagccgaccttgccgcgcagtacaccaccgttggacgcatggaccagggggtcggacttgtactccaagaactccgggatgctggcgtcctcaacgacacccttgtgatcttcacgtctgataacggcatcccgtttccttcaggacggacgaacctctactggccagggaccgcggaaccgctgctggtatcgtcaccggagcacccgaagcgttggggacaagtctccgaagcctatgtttcgctgctcgacctcaccccaaccatcctggactggttctccatcccatacccatcgtacgcgatcttcggctccaagactatccatctcaccggacgatcgctgctcccagcactggaggcagagccgctgtgggctacggtgttcgggagccaatcacaccacgaggtgacgatgtcgtacccgatgcggtcggtgcagcatagacacttccggctggtgcacaatctgaatttcaaaatgccgtttccaatcgatcaggatttctacgtctcacctacttttcaggatctgctgaacagaactactgcgggtcagcctaccgggtggtacaaggacctcagacactactactacagagctaggtgggaattgtacgaccgcagccgcgacccgcacgaaacccaaaatcttgcgactgacccgcgctttgcccaactgctggaaatgcttcgggatcaactggccaagtggcaatgggaaactcacgatccttgggtgtgcgcaccagatggtgtgctcgaggagaaactttcccctcagtgccagccccttcacaacgagctc

SEQ ID NO: 250719 - DNA, 1506 bp, synthetic construct
  misc_feature 1..1506: note = Description of Artificial Sequence: Synthetic coding sequence
  source 1..1506: mol_type = other DNA
atgagctgtccagtgcccgcgtgttgtgccctcctccttgttctcgggctgtgccgcgcccgtcctaggaatgcccttcttttgcttgcggatgatggtggatttgagtcgggagcctacaacaattccgcgattgcaacccctcacctggacgcacttgcaagaaggagccttctgttcagaaacgcttttacttctgtctcgtcatgctcgccttcgcgcgcatcactcctcactggcttgccacagcatcaaaacggaatgtacggtctgcaccaagatgtgcaccactttaactcctttgacaaggtccggtccctgcccctgcttctcagccaggctggtgtgagaaccggtatcattggaaagaagcatgtgggacccgagacggtgtacccatttgacttcgcatacactgaggaaaacgggagcgttctccaggtgggaaggaacatcacccgcataaagctcctggttagaaagtttctgcagactcaggacgacaggccgttttttctctacgtggcatttcatgacccacatcgctgtggacattcacaaccacagtacggtactttttgtgagaaattcggaaatggagaatcggggatgggtcggattcccgactggaccccacaagcatacgatccgctcgatgtcctggtgccttacttcgtgcctaataccccagcggcacgagcagatctggcggcacaatacaccaccgtcggaaggatggaccagggagtcggacttgtcctgcaggagctgcgtgatgcaggtgtgttgaacgacacgcttgtgatctttaccagcgacaacgggatcccttttccttccggacgcaccaacctgtactggcctggaactgccgaaccattgttggtatcatccccagaacaccctaagaggtggggccaggtgtcggaagcgtacgtgtcccttcttgatctgactcctactattctcgattggttctccattccttacccatcctatgcaatctttggatcgaaaaccatccatctgacggggaggtcactgcttcctgccctcgaagcagagcctctgtgggcaactgtctttggttcccagtcgcaccacgaagtcactatgtcctaccctatgcgttcagtgcagcacagacactttcgtcttgtccataaccttaactttaagatgccctttccaatcgatcaggacttttatgtcagcccaactttccaagacctgctgaaccggacgactgccggacagccgaccggttggtacaaagacctcaggcactactactacagagcccgttgggagctttatgatcgctcacgtgacccccatgaaacccaaaacctcgcaaccgacccacgctttgcacaattgttggaaatgctgagagatcaactggcaaagtggcaatgggagactcatgatccctgggtgtgtgcacctgatggagtgctggaggaaaaactgtcacctcaatgtcagcctcttcataacgaattg

SEQ ID NO: 250720 - DNA, 1506 bp, synthetic construct
  misc_feature 1..1506: note = Description of Artificial Sequence: Synthetic coding sequence
  source 1..1506: mol_type = other DNA
atgtcttgccctgtgcctgcgtgctgtgcgctcttgttggtcttgggtttgtgtcgggcgcgtccgcggaatgcacttcttcttcttgctgatgacggaggctttgaatcgggtgcatacaataactccgcaatagccactccacaccttgatgcacttgcaagacggagcttgctgttccgcaacgcgtttacctccgtctcgtcgtgttctccatcgagggctagccttcttactggacttcctcaacaccaaaacggaatgtacggacttcatcaagacgtgcaccactttaacagcttcgacaaggtgcgttcactccccctcttgctgtcacaggcgggagtgcggaccggaatcatcggaaagaaacatgtcgggccagaaactgtctacccttttgatttcgcctatacggaggaaaacggatccgtgttgcaagtgggacggaacataactagaatcaagctgcttgtgagaaaattccttcagacccaagacgaccgaccatttttcctgtacgtcgctttccatgacccacatcgctgcggccatagccaacctcaatacggcacgttttgtgagaagtttggaaatggcgagtcagggatggggagaatacccgactggaccccgcaggcatacgaccctcttgacgtgctggtcccctatttcgtccccaacactccggcagcacgagcagatcttgcagcccaatatacgaccgtgggaaggatggatcaaggggtgggactggttctgcaagaacttagggacgcaggggtcctgaatgataccctggtcatctttacctctgacaacggtattccctttccttcaggccgtactaatctctactggccaggtaccgctgagcctctgctggtcagctcaccggagcatccgaagcgctgggggcaagtttcggaggcatacgtgtcgctgctggatcttactccgaccatcctggattggttcagtattccatatccgtcgtacgcaattttcggctcaaagaccattcatctcactggtcgctcactcctccctgcattggaagcagagcctctgtgggctactgtgtttggttcccagtcacaccatgaagtgacgatgagctaccctatgcggtccgtccagcatagacacttccggttggtgcataaccttaactttaagatgccctttcctattgatcaagacttttacgtcagtccaacgtttcaggatctcctgaacagaaccaccgcaggccagcccactggatggtacaaagatcttagacattactactaccgtgcaaggtgggagctgtacgatcgctcccgcgatccccacgaaactcaaaatctcgccaccgatcctcgtttcgctcaactgctggaaatgttgagagatcaactggcaaaatggcagtgggaaactcatgatccatgggtgtgcgcccccgatggagtgcttgaagaaaagttgagccctcagtgtcagccacttcacaacgaactc

SEQ ID NO: 250721 - DNA, 1506 bp, synthetic construct; identical to SEQ ID NO: 250693
  misc_feature 1..1506: note = Description of Artificial Sequence: Synthetic coding sequence
  source 1..1506: mol_type = other DNA

SEQ ID NO: 250722 - DNA, 1506 bp, synthetic construct
  misc_feature 1..1506: note = Description of Artificial Sequence: Synthetic coding sequence
  source 1..1506: mol_type = other DNA
atgtcctgccccgttcctgcatgctgtgcactcctcctggttctcggcctgtgtagagcgcgacctcgtaacgcactccttctgcttgcagacgatggaggctttgaatctggagcatacaacaacagcgctatcgcaaccccccatctggatgccctggcaaggcgttcgctgctgttccgcaacgcatttacttccgtctcttcatgttcaccttcgcgcgcaagcctccttactggcctccctcagcaccaaaacggtatgtacggactgcaccaagatgtgcaccatttcaattcgtttgacaaggtgagatcccttcccctcttgctcagccaagcaggcgtgagaactggcatcatcggtaaaaagcatgtgggtcctgaaaccgtctacccgtttgattttgcatatactgaggaaaatggaagcgtcctgcaagtgggaagaaacatcacccgcattaaactcctggtcagaaagttcctgcagacccaagacgaccgacctttcttcctctacgtggcttttcatgatccacacagatgtggtcattcgcaaccacaatacggtacgttctgtgagaaattcggcaacggtgaatcaggtatgggaagaataccagattggactccccaagcatacgacccgcttgatgtgcttgtcccttacttcgtgccaaataccccagcagcacgtgccgatcttgccgcacaatacaccaccgtgggtcgaatggatcaaggcgtcggattggtgttgcaagaactccgcgacgctggagtccttaatgacactctggtcattttcacctcggacaacggtattccatttccatcggggcggaccaatctctactggccaggtactgcagaacctctcctcgtctcctcaccagagcatcccaagagatggggtcaggtgtccgaggcatacgtgagccttcttgatctcaccccaaccatccttgactggttctcgatcccatacccgtcgtacgccatttttggatccaagacgattcacctcactggccgatcacttcttcctgcgctggaagccgagccactgtgggcaactgtgtttggatctcagtcacatcatgaagtgacgatgtcctacccaatgagatcagttcaacatagacactttcgtctcgtccataacctgaactttaagatgccgtttccaatcgatcaggatttctacgtctcgcccacctttcaagatctgcttaatagaaccactgcaggccagccaaccggctggtacaaggacctgagacattactactaccgggcgcggtgggagctttacgacagatcgagagatcctcatgaaacccaaaatctggctactgatccgcgcttcgcacaactcctggaaatgcttagggaccagctggcaaaatggcagtgggaaacgcacgacccctgggtgtgcgcacccgatggagtcctggaagaaaaactgtcgccacagtgtcaacccctgcacaacgagctg

SEQ ID NO: 250723 - DNA, 1452 bp, synthetic construct
  misc_feature 1..1452: note = Description of Artificial Sequence: Synthetic coding sequence
  source 1..1452: mol_type = other DNA
atggcatgtagagggggggcagggaatggacaccgggcctctgcgacactgtcccgtgtaagcccaggttctctgtatacctgccgcaccagaacgcataatatttgcatggtatccgacttcttctatcccaatatgggaggcgtggaatcccatatctaccagttatcccagtgccttatagaaagaggtcacaaggttatcatagtgacacacgcgtacgggaatcgtaaagggatccgctatcttacttccggactgaaggtgtactatctgccacttaaggtcatgtataatcagtcgaccgctactacgctttttcacagcctgcctctgctccggtatattttcgtccgggagcgggtgacgatcatccacagccatagcagtttctctgccatggcacacgatgccctgtttcatgctaagacaatgggactacagacagtgtttacagaccactctctgtttggttttgccgatgtcagttctgtactgacaaacaagttgctcacggtctccctgtgcgacacgaatcatattatttgtgttagctatactagcaaagaaaatacagttcttcgcgccgctctgaacccagaaattgtaagcgtgattcccaacgctgttgatcccacagacttcacccccgatccttttcggaggcacgactccattactatcgtagtggtgagccggttggtgtaccggaaagggattgacctcctgtcaggaattatccccgagctgtgccagaagtaccccgacttgaattttattattggtggggaggggcctaaaagaattatcctcgaggaagtgagagaaaggtaccagctccacgaccgggtgcgccttctgggcgctctggagcataaagacgtccgtaacgtgctggtgcaaggccacatattcctcaacacgagtctgacagaagcattttgcatggccattgttgaagcagcttcatgtggtttacaggtggtatcaactagggtgggggggataccggaggtgcttccagagaacctgattattctctgcgagccctcagtgaagtctctgtgcgaggggctggagaaggcaatcttccagttgaaatccggtacgttgcccgcccctgagaacatccacaacatcgttaaaaccttctacacgtggagaaatgtggccgagcggactgagaaagtgtatgaccgcgtgagtgtggaggctgtgctgccaatggacaagaggctggacaggctaatcagtcattgcggaccggttaccggctatatcttcgcactgctggccgtgttcaatttcctattcttgatatttctgagatggatgacacctgacagcattattgacgtggctattgatgctacggggcccaggggcgcctggacaaacaattactcccacagcaaacggggcggggagaataatgaaatcagtgaaacacgg

SEQ ID NO: 250724 - DNA, 1452 bp, synthetic construct
  misc_feature 1..1452: note = Description of Artificial Sequence: Synthetic coding sequence
  source 1..1452: mol_type = other DNA
atggcctgccgtggcggcgctggcaacgggcaccgcgcatccgccaccctgtctcgcgtctcgccgggcagtttgtacacttgcagaacacgtacccacaacatctgtatggtcagtgacttcttttacccgaacatgggtggtgtggagtcccacatctaccagctaagccagtgcctgattgagcgcggccataaggttatcattgtaactcacgcttatggaaaccggaagggcatccgctacctgacgtctggtcttaaggtctactacctgcccctgaaggtcatgtacaaccagtcgacagccaccaccctcttccattcattgcccttgcttcgttacatattcgtccgcgagcgcgtcaccatcattcattctcactccagcttctctgccatggcccacgatgctctttttcatgccaagactatgggcctccagaccgttttcactgaccactcgctgttcggcttcgccgacgtgagttccgtcctgacaaataagctgcttaccgtcagcctctgcgataccaatcacatcatctgcgtctcgtacacgtccaaggagaacactgttctccgcgctgccttgaaccccgagatcgtttcggttatcccaaacgctgttgatccaaccgacttcactcccgatccctttcgtcgccacgactccatcaccatcgtcgtcgtgagtagattggtgtaccgtaaaggtatagacctcctctcggggatcattcccgagctgtgtcaaaagtaccccgatttgaatttcatcatcggaggggagggccccaagcgaatcatcttggaggaggtgcgtgagcgttaccaactgcacgatcgggtcagactgcttggcgccctggagcacaaggatgtccgcaacgtcctcgttcagggtcacatcttcctgaacacgagtctgacagaggccttctgtatggccattgtggaagcggccagctgtggactccaagtcgtttctacgagagtcggtggtatccctgaggtcctacccgaaaatttgatcatcctctgtgagccttccgttaagtccctctgcgagggccttgagaaggccattttccaattgaagtctggcacattgcccgcacctgagaacattcacaacatcgtgaagactttttacacttggcgcaacgtcgccgagcgcaccgagaaagtctatgaccgcgtcagtgtcgaagccgtcctccctatggacaagagacttgatcggctgatttcccactgtggtcctgttactggatacatcttcgccctgctcgctgtcttcaacttcctcttcttgatattcctgcgttggatgacccccgattctatcatcgatgtcgccatcgatgccacaggcccccgtggcgcctggaccaacaactactcccactcaaagagaggtggcgagaacaacgagatctccgagactcgg

SEQ ID NO: 250725 - DNA, 1452 bp, synthetic construct
  misc_feature 1..1452: note = Description of Artificial Sequence: Synthetic coding sequence
  source 1..1452: mol_type = other DNA
atggcttgtagagggggggccggcaacggacaccgcgcctctgccaccctgtcacgggtttctcctggtagtctgtatacctgcagaacaagaacccataatatatgcatggtgagcgatttcttttacccaaacatgggtggggtggagtcccatatttatcaactgtctcagtgcttgatcgagaggggtcacaaagtaataattgttacacatgcctacggcaaccgaaaggggatccggtacctgacatccggcttaaaagtctactatctgcccctgaaggtgatgtacaaccagtccacagccactacactgtttcactccctgccacttctccggtatatttttgtacgagagcgggtgaccataatccacagccacagttcattctctgcaatggcccacgacgcactgtttcatgctaagacaatgggtctgcagaccgtcttcaccgaccattcactattcgggttcgctgatgtcagcagcgtactgactaataaactcctcactgtaagtctgtgcgacaccaaccacatcatctgtgtaagttacacaagcaaagagaacacagttctgcgtgcagccctgaaccccgagattgtgtctgtaatcccaaatgctgtcgaccccactgattttaccccagatcctttccgaagacatgactccattaccatagtggtggtctctcggctggtgtatcgcaaaggaattgatttactgagtggcatcataccagaattgtgccagaagtaccccgatctgaattttataataggaggagagggccccaaaaggattatcttggaggaggttagagaaagatatcagctccatgacagagtacgtctgttgggagccctagaacataaggacgtgcgtaatgtccttgtccagggacacatctttttgaacacctccctgaccgaagcgttctgtatggcaatcgtggaggctgcatcttgtggtctacaggtggtctctactagggtgggaggaattcccgaggtgcttcccgagaacttaatcatcctatgcgagccgtccgtcaaatctctctgcgagggtctggagaaggccatcttccagctcaaatccggcaccctaccagcgccagagaatatccataatattgtgaagacgttttacacctggcggaacgtggcagagcgcactgagaaggtttatgaccgcgttagtgtcgaggccgtgctacctatggacaaacgcctggacagactgatcagtcactgtggacccgttacggggtatatcttcgccctgctggccgtgttcaattttcttttcctgatcttcctccgctggatgaccccggatagcataatcgacgtggccattgacgctactggcccgcgtggcgcctggactaacaattacagccactccaagcgcgggggggaaaataatgaaatatcggagacgagg

SEQ ID NO: 250726 - DNA, 1452 bp, synthetic construct
  misc_feature 1..1452: note = Description of Artificial Sequence: Synthetic coding sequence
  source 1..1452: mol_type = other DNA
atggcatgcagggggggggcagggaacggacacagggctagtgcaacactgtcacgggtttcccccgggtctctttatacatgtaggacacgaactcacaacatctgcatggtctctgatttcttttatcccaatatgggaggggtggaatcccatatataccaactcagtcagtgtctaatagagcgaggacataaagtcataatcgtcacacacgcctatgggaacaggaaaggaattcggtatctgacttcagggctcaaagtgtattatctccctctgaaagtaatgtataaccagtcaacagccactacactcttccactccctccccctccttagatatatctttgtaagagagcgggtcacaattatccattcccattcttctttctctgcaatggcccatgacgcactctttcatgccaaaacaatgggactccagacagtctttacagatcactctttgttcggattcgccgatgtgtctagtgtcttgactaataagcttttaacagtgagtctctgcgatacaaaccatatcatatgtgtctcttatacttccaaagaaaacactgtcctccgggccgctctaaaccccgaaatcgtttccgttatacctaacgctgtcgatcccacagattttacacctgatccttttcggcgccatgattcaataactattgttgtcgtgagtcgcctggtttatagaaaggggatcgatctcttatctggaatcatcccagaactgtgccagaaatatcctgacctcaattttataataggaggagaaggacctaaaagaatcatcctggaggaagtccgagagagatatcagctgcacgatagggtacggctcctaggggctctagaacataaagacgtgcgtaatgtactggttcaggggcatatctttctcaatacatccctgacagaggccttctgcatggcaattgtcgaagcagccagttgcggactgcaggtggtctcgacaagggttggagggatccccgaagttttgcccgagaacctgataatcttgtgcgagccctctgtgaagtcactgtgcgagggactagagaaggcaatcttccagctaaaatccgggactcttcctgcccccgaaaatatacacaatatagtgaaaacattttatacttggcgcaatgttgccgaaaggacagagaaagtctatgatagagtctctgtggaagctgtccttcctatggacaagcggctggacaggctcatttcccactgtgggcctgtgacagggtatatcttcgctctgctggcagtattcaactttctatttctcatctttcttcgatggatgactccggactccataatagatgtagccatcgatgctacaggaccccgcggagcatggactaataactactcacattccaaacgcgggggagaaaacaatgaaattagtgagactcga

SEQ ID NO: 250727 - DNA, 1452 bp, synthetic construct
  misc_feature 1..1452: note = Description of Artificial Sequence: Synthetic coding sequence
  source 1..1452: mol_type = other DNA
atggcctgccgcggaggtgctggaaatggtcatagagcctccgccacgctgagcagggtgtcaccaggcagcttgtacacttgtcgcactcgtacccataacatctgcatggtgtccgactttttctacccaaacatgggaggagtggagagccacatctaccaactgtcgcagtgcctgatcgaacgcgggcataaggtcatcatcgtgactcacgcctacggtaaccgcaagggaatccgctatctgaccagcggattgaaggtttactatctgccactgaaggttatgtacaaccagtcgaccgccaccacccttttccactccctgccgctcctgcggtacatcttcgtgcgggaaagagtgaccatcatccattcccactcgagcttctcggccatggctcatgacgcccttttccacgcgaaaaccatggggctgcagacggtattcactgatcactcgctgttcggcttcgccgatgtgagctccgtgttgactaacaagctgctcaccgtgtccctgtgtgacaccaaccacatcatttgcgtctcatacacttcgaaggagaacactgtgctgcgcgcggcgctgaatcctgagatcgtgtctgtgattcccaacgcggtggacccgaccgacttcaccccagatccgttcagacggcatgattccatcaccattgtcgtggtgagcaggctggtgtacaggaaggggatcgacctcctctctggcatcatcccggaattgtgtcaaaagtaccctgacctcaacttcatcattggcggcgagggaccgaaaagaatcatcttggaagaggtgcgcgagagataccagctgcacgaccgcgtgagactgctcggcgcgcttgagcacaaggatgtccgcaatgtgctggtccagggacacatctttctgaacacttccctgaccgaagccttttgcatggctatcgtggaagccgcgtcctgcggtctgcaagtggtgtccacgagggtgggcggcatcccggaagtcctgcctgaaaacctgatcatcctctgcgagccatcagtgaagtcgctgtgcgaaggactggaaaaggctatcttccaactcaagtcgggtacccttccggccccggagaatatccacaatattgtcaagactttttacacctggaggaatgtggccgagcggaccgaaaaggtgtacgatcgggtgagcgtggaggccgtgttgccgatggataagcgcctcgatagactgatctctcactgcggacctgtcaccggatacatcttcgcgctgctggccgtattcaattttctgttcctcattttcctccgctggatgactccggattcgatcattgacgtggcaattgacgccaccgggccgagaggggcgtggactaacaattactcgcattccaagcgcggaggcgagaacaacgagatctcagagacgagg

SEQ ID NO: 250728 - DNA, 1452 bp, synthetic construct
  misc_feature 1..1452: note = Description of Artificial Sequence: Synthetic coding sequence
  source 1..1452: mol_type = other DNA
atggcatgtcgcggcggcgccggaaacggccatcgcgcctcggcaactctgtcccgagtgtcgccgggatcactctacacgtgtcggacccggactcacaacatctgcatggtttccgacttcttctacccgaacatggggggagtcgaaagccacatctatcagctgtcccagtgtcttatcgaacgcgggcataaagtgatcatcgtgactcatgcatacggtaatcgcaagggaatccgatacctgacctcgggcctgaaagtctactacctgccactgaaagtgatgtacaaccaatcgaccgccaccacgctgttccacagcctcccgctgctgcggtacatcttcgtgagggagcgggtgaccatcatccactcccattcgtcattcagcgccatggctcacgatgccctgtttcatgctaagaccatgggcctgcagactgtctttaccgaccactccctgttcgggtttgcggacgtttcctcagtcctgacgaacaagctcctcactgtgtccttgtgcgatactaatcatatcatctgtgtctcatacacctctaaggagaatactgtcctgagggcggcgcttaatccggaaatcgtctccgtaatcccaaacgcggtcgatccaactgattttactccagacccgtttcgcagacatgactcaatcacgatcgtggtggtgagcagacttgtgtatcggaaggggatcgatcttctcagcggcatcattccagagttgtgccagaaatacccggacctgaacttcatcatcggaggcgaggggccaaagcggatcatcctggaagaagtcagagaaagataccagttgcatgacagagtcagactgctgggagccctggaacacaaggacgtgagaaacgtgttggtgcaaggtcacatcttcctgaatacttcgcttaccgaggctttttgcatggcgatcgtggaagccgctagctgtggactccaagtcgtctctacgagggtaggtgggatcccggaggtcctcccagaaaacttgatcattctctgcgaacccagtgttaaatcactgtgcgagggactggagaaggctatcttccagctgaagagcggaaccctgcctgcgcctgaaaacatccacaatatcgtgaaaaccttctacacctggaggaatgtcgccgaaaggaccgagaaagtgtacgacagagtcagcgtggaggccgtgctgccgatggacaagcggctcgacagacttattagccactgcggcccggtcaccggatacatcttcgcactgttggccgtgttcaactttttgtttctgatattcctgagatggatgacccctgatagcatcatcgacgtcgctattgacgcgacgggaccgcggggagcctggaccaacaattactcacacagcaagcgtggcggagagaacaatgagatcagcgaaacccgc

SEQ ID NO: 250729 - DNA, 1452 bp, synthetic construct
  misc_feature 1..1452: note = Description of Artificial Sequence: Synthetic coding sequence
  source 1..1452: mol_type = other DNA
atggcttgtcgaggaggagctggcaatgggcaccgcgcctccgccactctatcgcgagtaagtccggggtccttgtacacatgtcggacccgtacacacaatatttgtatggtttcggactttttctacccaaatatgggtggagtcgagtcccacatctatcagttgtctcaatgcttgatcgaacgtggtcataaggtcattatcgttactcacgcttatggaaatagaaagggaattcgctatttgacttctgggcttaaagtatattatttgccactcaaagttatgtataaccaatccaccgcaactaccttgttccatagtttaccactccttcgctatattttcgtcagggagcgggttacgataattcattcacactcttcgttctctgccatggctcacgatgcgttatttcatgcgaaaacgatgggattacagactgtttttacggaccactctttattcggatttgccgatgtcagtagtgttctgacgaacaaactgctcactgtttcactgtgtgatactaatcatattatttgcgtgtcatatacttctaaggaaaatactgtactccgtgccgctttaaatccggagatcgtatccgtcattccaaacgcagttgacccgactgactttactcctgatccattccgacgtcatgacagtattactattgtagttgtctcacgtctagtctacagaaaggggattgatctccttagcggaattattccggaactttgtcaaaaatatccggatttgaacttcatcataggaggagaaggaccaaagcgtattattctggaagaagttagagagcgttaccaacttcatgatagagttaggctgctcggagcattggagcataaggacgttcgtaatgttctggtgcaggggcatatctttttgaatacatctttgactgaagccttttgcatggcaattgtagaagcagcaagttgtggccttcaagtggtttctacacgagtgggaggaattccagaagtgctaccggagaatttaattattctttgcgaaccatccgttaaatcattgtgcgaaggacttgagaaggcaatattccaacttaaatcaggaacacttccggccccagaaaacattcataatattgttaagacattctacacatggaggaatgtagcagaacgcacggagaaagtatatgaccgggtttccgttgaagctgttttacctatggacaagcgtctggatcgtctcatctcccattgtggaccggtcacaggatatattttcgctttgctcgctgtatttaattttctattcttgatttttcttaggtggatgacccctgactcaataatcgatgtagccattgatgcaactggaccaaggggagcttggactaataattactctcactctaaacgagggggcgagaacaatgaaatttctgagactcga

SEQ ID NO: 250730 - DNA, 1452 bp, synthetic construct
  misc_feature 1..1452: note = Description of Artificial Sequence: Synthetic coding sequence
  source 1..1452: mol_type = other DNA
atggcctgcaggggcggagcggggaatgggcaccgagcatcggcaaccctgtccagggtgagccccggctccctctacacatgcagaacccgcacccacaatatatgtatggtctctgacttcttttatcctaacatggggggagtggagtcccacatctatcagttgagccagtgcctaatcgagcgaggccacaaggtgataatagttacccacgcctatggtaatcggaagggaatacgttatctgacgagtgggttgaaggtgtactatcttcctctcaaagtgatgtacaaccaaagcactgctaccacactgttccatagtctccccctgctgagatacatattcgtcagggagcgggtgacaataatacactcccacagctctttctccgccatggcacacgacgcattgttccatgccaagaccatgggacttcagaccgtgtttacggaccattcgctgttcggtttcgctgacgtttctagtgtcctgactaataagctccttacggtcagcctgtgtgacaccaatcacataatttgtgtatcttacacaagcaaagagaacaccgtgcttcgagcagcgctgaaccctgaaatcgtgtcagtgattcccaacgctgtggatcccaccgattttacacctgacccttttcggcgtcacgatagtatcactatcgtcgtggtttcccgccttgtgtataggaaaggcattgacttgctatctggaatcatccctgaactgtgccaaaagtaccccgacctgaacttcattattggcggcgagggacccaaacgaattatccttgaggaagttcgcgagaggtatcagctccatgaccgggtgcggcttcttggagcccttgaacacaaggacgtacgaaacgtgctcgtgcagggacatatcttcttgaacacatccctgaccgaagctttttgtatggctattgtcgaagctgcaagctgcggcctccaggtggtttccactagagtgggcgggatcccagaggtcctgccggagaatcttataattctttgcgagccttcagtgaaatctttgtgcgaaggcctggagaaggcaattttccagttgaaatctggcaccctgccagctcccgaaaacattcataacatcgttaagaccttctatacttggcggaacgtggccgaaaggacagagaaagtgtacgatcgcgtttcagtcgaagccgtcctgccgatggataagagactcgaccggctgatctcacactgcgggccggtgacaggctacattttcgctctgttggcggtgttcaattttctcttcctaatcttcctacggtggatgactccagactccattattgatgtagctatagatgcaaccggacctcgtggtgcttggacaaacaactactcccacagcaagagaggcggtgagaataatgagattagtgagacaagg

SEQ ID NO: 250731 - DNA, 1452 bp, synthetic construct
  misc_feature 1..1452: note = Description of Artificial Sequence: Synthetic coding sequence
  source 1..1452: mol_type = other DNA
atggcctgcagaggaggtgccggcaatggtcaccgcgcatcagcgaccctgtcccgggtatcgcctggatcgctgtacacttgccgcactcgcacccataacatctgcatggtcagcgacttcttctaccctaacatgggcggcgtggaaagccacatctaccagctgtcgcagtgcctgattgagaggggacacaaagtgatcattgtgacccacgcatacggaaacagaaaaggaattcgctacctcacctccggcctgaaagtgtattacctgcctcttaaagtcatgtacaaccagtctacggctaccaccctgtttcacagcctgccactgctgcgctacatcttcgtgcgggagcgagtcactattatccactcgcactcgtcgttctcggcgatggcacacgatgctctgttccacgcaaaaacgatggggctccaaactgtcttcactgatcacagcttgtttgggttcgccgacgtctcatcggtcctcacgaacaagctgctgaccgtctcgctgtgcgacaccaaccatatcatctgcgtctcgtataccagcaaggaaaataccgtgctccgcgctgccctgaatccagagatcgtgtcggtgatcccgaacgctgtggaccctactgacttcactccggacccgttcaggcggcacgactcaatcactatcgtcgtggtgtcccggcttgtttaccgcaaggggattgacttgctgtcgggcatcattccagaactttgccaaaagtacccggacctgaacttcatcatcggaggcgaagggccgaagagaattattctggaggaagtgcgcgaaagataccagcttcacgaccgagtgcgcttgcttggcgctctggagcataaggatgtccggaatgtgctggtgcaaggtcacatcttcctcaatacctccctgaccgaagcgttctgcatggcgatcgtggaggccgcctcatgtggattgcaggtcgtgagcactagagtcggagggattccggaggtgctgccggaaaatctgatcatcttgtgcgaaccgtcggttaagtccttgtgtgaaggcctggagaaagccatcttccaacttaagtccggcactctcccagctccggaaaatatccacaacatcgtgaagactttttacacctggagaaacgtcgccgaacggactgaaaaggtctacgatcgcgtctcggttgaagcggtcctgccgatggataagcgcctggatagactgatcagccactgcggaccggtcacgggttacatcttcgcactgctggccgtgtttaactttctcttcctcattttcttgaggtggatgactccagactcgatcatagacgtggcaattgatgcgaccggaccacggggagcctggaccaacaattactcacactccaaaaggggtggagaaaacaatgagatctccgaaactcgc

SEQ ID NO: 250732 - DNA, 1452 bp, synthetic construct
  misc_feature 1..1452: note = Description of Artificial Sequence: Synthetic coding sequence
  source 1..1452: mol_type = other DNA
atggcatgtagaggaggtgccggaaatggtcatagggcatctgcgactctttcaagagtgtctcccggaagcctgtacacctgtcgtaccaggactcataacatttgtatggtgtcggacttcttttacccgaacatgggaggagtcgaatcccacatttatcagctttcacaatgtctcatagaaagaggtcacaaagtcataatagtgacccatgcatacggaaaccgaaaaggtattcgttatctgacttccgggctcaaggtgtactacctgccactgaaggtgatgtacaatcaatccaccgccaccaccctttttcactccctgcctcttctcaggtacatttttgtccgagaacgtgtgacgattatacattcgcatagctccttctcggcaatggcacatgacgcactctttcacgcaaagaccatgggactccaaaccgtgttcactgaccattccttgtttggcttcgcagatgtctcgtcagtgctgaccaataagctcctgacggtgtcgctgtgcgacaccaaccatatcatttgcgtgtcatacacgtccaaggagaacaccgtcctccgcgcagcccttaaccctgaaattgtgtcggtcattcctaatgccgtggaccctaccgatttcactccagacccctttcgcaggcatgactccataaccatagtcgtggtgtcccggcttgtgtacagaaaaggaatcgatcttctctccggaatcattcccgaactgtgccaaaagtacccagatctcaacttcataattggtggagaaggaccgaagaggattatactcgaagaagtgagagagcgctaccaacttcatgaccgagtgcgactgctcggcgcactggaacacaaggatgtccgcaacgtgcttgtccaaggtcatatcttccttaacacttcccttactgaggccttttgtatggcaatcgtcgaagccgcttcctgtggtttgcaagttgtctccacgagagtggggggaatcccagaagtgctgccagaaaacctgattatactttgtgagccatcagtcaagtctctttgtgaaggacttgagaaagcaattttccaactcaagtccggtacgcttcctgcacccgagaacattcataacatcgtgaaaaccttttacacttggcggaatgtcgccgaacgcactgaaaaggtgtacgatagagtgtcggtggaagctgttctccctatggataagagacttgatcgcctgatctcccattgcgggcctgtgactgggtacatcttcgcccttctggcggtctttaacttcctgttcttgatatttctgagatggatgacccccgattcgatcatcgatgtggcaattgatgcaaccggaccccggggtgcatggactaacaactactcgcatagcaagcggggtggagagaacaacgagattagcgagactcgt

SEQ ID NO: 250733 - DNA, 1452 bp, synthetic construct; identical to SEQ ID NO: 250730
  misc_feature 1..1452: note = Description of Artificial Sequence: Synthetic coding sequence
  source 1..1452: mol_type = other DNA

SEQ ID NO: 250734 - DNA, 1452 bp, synthetic construct
  misc_feature 1..1452: note = Description of Artificial Sequence: Synthetic coding sequence
  source 1..1452: mol_type = other DNA
atggcgtgtaggggcggggccgggaacgggcacagagcaagcgcaaccctgtctagggtgtccccagggtcgttatacacctgcagaaccagaacccataatatttgcatggtttccgattttttttaccccaatatggggggcgtagaaagccatatctaccagttgtcgcaatgcctaatcgaacgtggtcacaaagtgataatagtaacacacgcttacggcaacaggaaaggaatcaggtatcttactagcggattgaaggtctactacctgcccctgaaggtgatgtacaaccaatccactgcgaccacacttttccactcgttacccctattaaggtatatcttcgtgagagagagggttacaattatacactcacattctagcttctcggcaatggcccacgatgcactcttccacgcgaagacaatgggactgcagaccgtatttacagaccactccctgtttggattcgccgatgtttctagcgtgcttactaacaagctgcttacagtgtccctgtgtgacacgaaccacattatttgcgtatcctacacgtctaaagaaaatacagtccttagggctgcactcaatcccgaaatcgtgtccgttatccctaacgctgtagaccccaccgatttcacccctgatccattccgccgacatgattccattacaattgtggtcgtgagtagattggtctacaggaagggaatagatttgctgtcaggcatcatacctgaactgtgtcagaagtatcccgatctcaatttcatcatcggcggagaagggcccaagagaattattctcgaggaagtgcgagaacgttaccaactacatgacagagtgagactgttaggcgcccttgagcataaggacgtgaggaatgttctcgttcagggccatatctttttaaacaccagcctcactgaggctttttgtatggccatcgtggaagcggcatcctgcgggttgcaagtggtgagcacacgagtcggcggtattcccgaagtacttccggaaaatctgataattttgtgcgaacccagcgtgaagagcctttgtgaagggctggaaaaagctattttccagctgaagagtggtaccctgccagcgccggaaaatatccataatattgttaagacattctatacttggcgaaacgtggccgagcggactgagaaagtgtacgatcgtgttagtgtggaggccgtgttgcccatggacaagcggctcgacaggttaatttcacattgcggccccgtaacaggttatatcttcgcattgcttgccgtctttaactttttatttctcatatttctaagatggatgactcccgatagcatcatcgacgtagctatcgatgcgaccgggcctagaggtgcatggacgaacaattactcccacagcaaacgtggcggcgaaaataatgaaatcagcgagacgagg

SEQ ID NO: 250735 - DNA, 1452 bp, synthetic construct
  misc_feature 1..1452: note = Description of Artificial Sequence: Synthetic coding sequence
  source 1..1452: mol_type = other DNA
atggcgtgcaggggaggagccggtaatggccaccgcgcttcggccaccctttctcgcgtgtctccgggatccctctacacctgtcggactcgaactcacaacatatgtatggtgtcggatttcttttatccgaacatgggaggtgtggaatcgcacatctaccaactttcacagtgcctgatcgaacgcggacataaggtgatcatcgtcactcacgcatacggaaatagaaagggtatcaggtaccttacgtcgggtttgaaagtgtactacctcccgttgaaggtgatgtacaatcaatccaccgccactactctgttccattcgctgccgctcctgaggtacattttcgtccgcgagagagtgaccatcatccattcccactcctcgttctcagccatggcacacgacgctctcttccatgcaaagactatgggtctgcagactgtgttcaccgaccactccctgttcggatttgcagacgtgagcagcgttctgaccaacaaactgctgaccgtgtcgctttgcgataccaatcacatcatttgcgtttcatacacctcaaaggaaaacacggtcctccgggccgccctgaacccggagatcgtgagcgtaatcccaaatgccgtggacccgactgacttcacccctgacccgtttaggagacacgactcgattactatcgtcgtggtgagccgtctggtgtatcggaagggcatcgacttgctttctggaattatcccggaactgtgtcagaagtaccccgatctgaacttcatcatcggaggggagggacctaaaaggatcatcctcgaagaagtgagagagcggtaccagctccacgatcgtgtgcgcttgctgggagcgctggaacataaggatgtccggaacgtgttggtgcaaggccacattttcctcaacacttccctgactgaggcgttctgcatggccattgtcgaagccgcgagctgcggactgcaggtcgtctccaccagagtggggggcatcccagaggtgttgcccgagaacctcatcatcctctgcgagccaagcgtgaagtctctgtgcgaaggcctggagaaagctatctttcagctcaagtcgggcacgcttccggcacctgaaaacatacataacatcgtaaaaactttctacacctggcgtaatgtggcagaacgaacggagaaggtatacgaccgcgtgtcggtcgaggctgtcctgcccatggataagcgcttggaccgccttatcagccactgcggaccagtgaccgggtacatctttgcgctcctcgccgtgttcaatttcttgttcctcatctttctgcggtggatgacccctgactcaatcatcgatgttgctattgacgcgactggcccacgcggagcctggaccaataactactcccattcgaaacggggaggggaaaacaatgagatctcagaaactcgc

SEQ ID NO: 250736 - DNA, 1452 bp, synthetic construct
  misc_feature 1..1452: note = Description of Artificial Sequence: Synthetic coding sequence
  source 1..1452: mol_type = other DNA
atggcctgtaggggaggtgctggaaatggccacagggcctccgccacactaagccgggtgagtccggggtcattgtacacgtgccggaccaggacacacaacatttgtatggtttctgatttcttttaccctaacatgggcggagtggaaagccacatataccagctttcacaatgcctgattgagaggggccataaggtaatcatagtgacccacgcttatggtaaccggaagggcatacgttatctgacaagcggtctaaaagtatattatctgcctttaaaagtaatgtacaaccagtccaccgccacaacactgttccacagtctgcctctccttcgctatattttcgtccgtgagcgcgtgacaatcatccattcccactccagcttcagcgctatggcccacgatgcactgttccacgcaaaaaccatgggactacaaactgttttcaccgaccacagtctgttcggcttcgcggacgtgtcaagcgtattgacgaacaagctattgactgtctccttgtgcgacaccaaccacatcatttgcgtgagctatacaagcaaggaaaatactgttctgagagctgcactgaaccccgagattgtctctgtaatccccaacgccgtggatccgacagatttcacacctgatcctttccggcggcatgatagtataacaatcgttgttgtcagccgcctggtgtatagaaaagggatcgatctgctgagcgggatcattcccgagttatgtcagaaatatccggacctgaacttcattataggaggcgagggtccgaaacgaattatccttgaggaagtgagggaacggtaccagcttcacgacagagtgcgcttgctgggcgcgctggagcataaagatgttcggaatgtgttggtacaggggcacatttttctcaataccagcctgacagaggctttctgcatggcgattgtagaagctgcaagttgcggcctccaagtggtctctacgagggtgggcggtatccccgaggtgctgcctgagaatttaatcatactatgcgaaccatctgtgaagagcctctgcgaaggactggagaaggcaatttttcagttgaagtctggaactctgcccgccccagaaaatatccacaacattgttaaaaccttttacacctggcgcaatgtagccgaaaggacagagaaggtgtatgaccgggtgtccgtggaagccgttttgccaatggacaagaggctggatcgcttgatctcccattgtgggcccgttaccgggtatatttttgctctcctggccgtcttcaacttcctgtttctcatttttcttagatggatgacccctgacagcataatcgatgtcgccatagacgcaaccggcccccggggcgcctggaccaataactactcgcacagcaagaggggcggcgagaacaacgaaattagcgagacccgg

SEQ ID NO: 250737 - DNA, 1452 bp, synthetic construct
  misc_feature 1..1452: note = Description of Artificial Sequence: Synthetic coding sequence
  source 1..1452: mol_type = other DNA
atggcctgccggggaggagcggggaatggacaccgcgcaagcgccaccctgagccgagtctctcctggctcgctctacacgtgccgcactcgcacgcacaatatctgcatggtgagcgacttcttctatcccaacatgggaggagtcgaatcacacatctaccagctgtcccagtgcctgatcgaacggggacacaaagtgatcatcgtcacccatgcctatgggaatcggaagggaatccggtatctgacttcaggactgaaggtctactaccttccgttgaaggtgatgtacaaccagtccaccgcgactactttgttccatagcctgccactgctccggtacatctttgttcgggagcgcgtgactatcattcactcccactcctcgttctcggcaatggcgcatgatgctttgttccatgccaagactatgggactccaaacggtgttcaccgaccattcactctttggctttgcggacgtgtcctcagtcctgaccaataagctgctcaccgtgtcactgtgtgataccaaccatatcatttgtgtgtcatacacctccaaggaaaataccgtgcttcgcgcggctctcaatccagaaatcgtgtcggtcataccgaatgcggtggacccaactgacttcactcccgacccatttaggcggcatgactccatcactattgtggtcgtgtccagattggtctaccgcaaaggcatcgacctcctgagcggcatcatccctgagctgtgtcagaagtacccggatctgaacttcatcatcggaggagaagggccgaagaggatcatactggaggaagttagggaacgttaccaactgcacgatcgcgtgcgcctgctcggcgctcttgagcataaggatgtgcgcaacgtcctggttcagggacacattttcctcaacacttccttgacggaagccttttgcatggctattgtggaggccgcctcctgcggtctgcaagtcgtgtcgaccagagtgggaggtatcccagaggtgctcccagagaatctgatcattctctgcgaaccctcagtgaagtcgctgtgtgaaggtctggagaaggcaattttccagctgaagtcgggaactctgccagcaccagaaaacatccacaacattgtgaaaacgttctacacctggcgcaacgtggccgaacgcactgaaaaggtgtacgaccgggtgtccgtggaggcagtcctgccgatggacaaacggctcgatagattgatatcgcactgtggcccggtgactggatacatctttgcgctgttggccgtgttcaatttcttgtttctgatcttcctgcgttggatgaccccggactccatcatcgatgtggccatcgacgccactggcccgagaggagcgtggaccaacaattacagccactccaaacgaggaggagaaaacaacgaaatctcggaaacccga

SEQ ID NO: 250738 - DNA, 1452 bp, synthetic construct
  misc_feature 1..1452: note = Description of Artificial Sequence: Synthetic coding sequence
  source 1..1452: mol_type = other DNA
atggcatgccgtggaggagccggcaacggacaccgggcctcggctaccctctccagagtctcaccgggatccctgtacacttgtcgcactagaacccataacatctgtatggtgtcggattttttctacccaaacatgggaggagtcgaatcgcacatctaccagctgagccaatgcctcatcgaaaggggacacaaggtgattatcgtcactcatgcctacggcaaccgcaaaggaatccggtaccttacttcaggactgaaggtgtattacctgccgttgaaagtcatgtacaatcaatcaaccgcgacgacgctcttccacagcctgcctctcctgcgctacatttttgtgcgggaacgcgtgaccatcatccactcccactcctccttcagcgcgatggcccacgatgctctgtttcatgccaagacgatgggcctccagaccgtgttcactgatcattcactcttcggatttgcggatgtgtcgtctgtactcaccaataagctcctgaccgtttccctgtgcgacaccaaccatatcatttgcgtcagctacacctccaaggaaaacaccgtgttgcgcgccgctctgaacccggagatcgtgtccgtgatccccaatgccgtcgatccgactgactttaccccagacccttttcggcggcatgattctattactatcgtggtcgtgtcgcgcttggtgtacaggaaaggaatcgacctcctgtcgggaatcatccccgagctgtgccagaaatacccagacctgaacttcatcatcggcggcgaaggaccgaagcgaattatcttggaggaagtgagggagcggtaccagttgcacgacagagtgaggctcctgggggcactggaacacaaggacgtgcgcaacgtgctggtccagggtcatatcttccttaacaccagtcttactgaggccttctgcatggcaatcgtggaggccgcctcctgcggactccaagtcgtgtcgaccagagtgggtggtatcccagaagtgctccctgagaacctcatcatcctgtgcgaaccgagcgtcaaatcactgtgtgaagggcttgaaaaggcaatcttccagctgaagtccggcactctgccggcgccagaaaacatccataatatcgttaagacgttctacacctggagaaatgtggcggagcggaccgagaaggtgtacgaccgagtcagcgtggaggctgtgctgccgatggacaagcggttggaccggctgataagccactgcggcccggttactgggtacattttcgcgctgctggccgtgttcaatttccttttcctgatcttcctgagatggatgactcccgattcgattatcgatgtcgctatcgacgcaactgggcctcgcggtgcgtggaccaacaattattcacactcgaaacgcggcggggaaaataacgagatcagcgaaactcgc

SEQ ID NO: 250739 - DNA, 1452 bp, synthetic construct
  misc_feature 1..1452: note = Description of Artificial Sequence: Synthetic coding sequence
  source 1..1452: mol_type = other DNA
atggcatgccgcgggggagccggaaacggccatcgggccagtgctacattgtctcgcgtgagccctgggtcactgtacacctgccgaacacgtacgcataatatttgtatggtgagcgactttttctatccaaatatgggaggcgtggaaagccatatctatcagttgtctcagtgcttgatcgaaagagggcacaaggtcattatcgtgacccacgcatatggaaatcggaagggtatccgttatctgaccagcgggctgaaagtctactacttgccgctgaaagtgatgtataatcagagcaccgccaccaccttatttcacagtctgcccctgttacggtacatctttgtgagggagagagtcaccattatccatagtcattcttctttctctgcaatggcacacgacgccctcttccatgctaaaacaatggggcttcagacagtgttcaccgatcactccttgtttggcttcgcggatgtgtcaagtgtgctgaccaataagctgctaaccgtgtcgctctgcgataccaaccacattatctgcgtgagttacacatcaaaggagaataccgtgctgcgggccgccctgaaccctgagatcgtaagtgtcattcctaacgccgtggatcccactgacttcacaccagacccttttagacgccatgatagcataactatcgtagtcgtctccaggctggtgtaccgcaagggcatcgatttgttatccggcataattcccgagctttgccagaagtatcccgacctgaatttcataattgggggagaagggcctaagagaataatcctggaagaagtgagggaaagataccagcttcacgaccgggtgcggcttctgggagccctcgagcataaggatgtgcgtaacgttttggtgcaggggcatatctttttgaatacatccctcactgaggccttttgcatggccattgtcgaggccgcctcctgcgggctacaggttgtgagcacccgcgtgggcggaatccccgaagtgctcccagagaatctgattatcttgtgtgagccctctgtcaaatctttgtgcgaagggttagaaaaggcaatctttcagctcaaatcagggactctgccagcacccgagaacatccacaatatcgtaaaaaccttttatacttggagaaacgtggctgagcggaccgaaaaggtctacgaccgggtgtccgtagaggccgttctccctatggataagagactggaccgcctgatctcgcactgcgggcctgtgactggatatatatttgccctattagcagtgttcaacttcctgtttctgatttttctccggtggatgacacctgatagtatcatcgacgtcgccatagacgcaacaggccctcgtggcgcctggactaataattactctcacagcaagagaggtggcgaaaacaatgaaatcagtgagacgcgc

SEQ ID NO: 250740 - DNA, 1452 bp, synthetic construct
  misc_feature 1..1452: note = Description of Artificial Sequence: Synthetic coding sequence
  source 1..1452: mol_type = other DNA
atggcgtgcaggggaggcgctggtaacggacatcgagcttccgctaccctctctcgtgtgtcacctggttccctctacacgtgcagaacccgcactcataacatctgcatggtatccgacttcttctacccgaacatgggtggagtcgagtcgcacatttaccaactgtcgcaatgcctcatcgaacgggggcacaaagtcataatcgtgactcatgcgtacggaaacagaaagggaatccggtaccttacttcggggcttaaggtttactacctccctctgaaggtcatgtacaaccagtccaccgcgaccaccctgttccacagcctccctctgcttcgctacatctttgtgagggaacgggtgaccatcattcatagccactcgtcgttctccgctatggcccatgacgcgctgttccacgctaagaccatgggactccagaccgtgttcactgaccactcactgttcgggttcgccgacgtgtcctccgtcctgacgaataagctgttgactgtgtccctctgcgacaccaaccacatcatctgcgtgagctacacctcgaaggagaatacggtcctgagggcagcgttgaaccctgaaatcgtgtcggtgatccccaacgccgtggaccctaccgatttcaccccggacccgttcagacggcatgattccatcactatcgtggtcgtctcccggctggtgtaccgtaagggcatcgacttgctcagcggaatcatccctgagctctgtcagaaatacccagacctgaacttcattatcggcggagagggcccgaaacgcattatcctcgaagaagtccgtgagcgctaccaattgcacgatcgggtgcgccttctgggtgcactggagcacaaggacgtccggaatgtgttggtgcaaggacatatctttctcaataccagccttactgaagcattctgtatggccatcgtcgaagcggcttcgtgcgggctgcaggtagtctccactagagtgggaggaattcctgaggtcctgccagaaaacctcatcatactgtgtgagccgtcggtgaagtccctgtgcgaaggcctggaaaaagccatcttccaactcaagtccggcaccctcccggcgccagaaaacatccacaacatcgtgaaaactttctacacctggcggaacgtggccgagagaactgagaaggtctacgacagagtgagcgtggaggcggttctgcccatggataagcggctggacaggctcatctcgcactgcggtcctgttaccggttacatcttcgccctcctggcggtgtttaacttcttgtttcttatctttctgaggtggatgactccagactccattatcgatgtggctatcgacgcaaccggaccgcgcggcgcatggaccaacaattactcacattcaaagagaggaggagagaataatgagatcagcgagactcgg

SEQ ID NO: 250741 - DNA, 1452 bp, synthetic construct
  misc_feature 1..1452: note = Description of Artificial Sequence: Synthetic coding sequence
  source 1..1452: mol_type = other DNA
atggcttgcagaggtggggcgggaaatggccatagagcctccgcgaccctgtcgagagtgtccccgggttccctttacacctgcagaacgcgaacccacaacatttgcatggtcagcgacttcttctacccgaacatgggcggagtggagtcgcatatctaccagttgtcccagtgcctcatcgaacgcggacacaaagtgatcatcgtcactcacgcctacggcaatcgcaaaggcatccgctaccttaccagcggactgaaggtctattaccttccactgaaggtgatgtacaaccagtccacggccacgaccctgtttcattcgctgcctctcctgcggtacatcttcgtccgcgagagagtgaccattatccactcccattcatcattctcagcgatggcccacgacgcattgttccatgcaaaaacgatgggactccagactgtgtttaccgatcattccctgtttggattcgccgatgtgtcaagcgtgcttaccaacaagctgttgactgtttcgctgtgcgataccaaccacatcatctgtgtgtcgtacacctcgaaggagaatacggtcctgcgggccgccctgaaccctgagatcgtgtcggtgatcccaaacgcggttgatccgaccgactttacccccgacccgttcaggcggcacgattccatcactatcgtggtcgtgtctcgcctggtgtacagaaaaggaatcgatctccttagcgggattatccccgaactgtgtcagaagtacccggacctgaatttcatcattggaggagagggcccaaagcgcatcatcctcgaggaggtgagagagcgatatcagctccacgacagggtgcgcctgctgggagccctggagcacaaggatgtccgtaacgttctggtgcaaggacacatcttcctcaatacctcactgactgaagccttttgtatggctatcgttgaggctgcaagctgcggactccaggtcgtgtcgacgagggttggaggaatcccagaagtgctgccggaaaacctgatcatcctgtgcgaaccgagcgtcaagtccctttgcgaagggctcgaaaaagccatattccaactgaagagcggaacgctgcccgccccagagaacattcacaatatagtcaagaccttctacacttggcggaacgtggcggaacggactgaaaaagtgtacgatagggtgtcagtggaagcggttcttcctatggataaacggctggatcgcctgatatcgcactgcgggcccgtgaccggttacatcttcgcgctcctggcagtgttcaacttcctgttcctgatcttcttgagatggatgactcctgactcgatcatcgatgtcgccatcgacgccactggaccgcggggagcgtggaccaacaattactcgcactccaaacggggaggcgaaaacaatgaaatctcggaaactcgc

SEQ ID NO: 250742 - DNA, 1452 bp, synthetic construct
  misc_feature 1..1452: note = Description of Artificial Sequence: Synthetic coding sequence
  source 1..1452: mol_type = other DNA
atggcctgccgcggcggagccggcaatggccacagggcctccgccactttgtccagagtttcccccgggtcactctatacttgcagaacccggacccacaacatatgcatggtaagcgatttcttctaccccaacatgggcggcgtggagtcacacatataccagctgagtcaatgtcttatagagagaggccataaagtgattatcgtgactcatgcctacggcaaccgaaagggcattcggtatctgaccagcggcctcaaggtctattacctgcccctgaaggtgatgtataaccagtccactgccaccaccctgtttcactctctgccattactccgatatatattcgtgcgcgaacgggtcacaatcattcatagtcatagcagcttctcagccatggcccatgacgccctgttccacgcaaagacaatggggttgcagacagtctttaccgaccattcactattcggattcgccgacgtgagcagtgttttgactaataaactgctgactgtcagtctgtgtgataccaatcacataatctgtgtgagctacacatctaaggaaaatacagtgctgagggccgctctgaaccccgaaatcgtgtccgttattcctaatgccgttgatccaacagactttacacctgaccctttcagaaggcatgattccataactattgttgtggtcagtcgcctcgtttatcgcaaaggcattgacctcctgtctggcattatacctgagctctgccaaaagtaccctgatctaaattttattatcggcggagagggccctaaaaggattatcctggaggaggtgcgtgaaagatatcaactacacgacagagtgagactgctgggggccctggagcacaaagatgtcagaaatgtgctcgtccaaggacatatcttcctgaacacaagcctaactgaagccttttgtatggcaatagtggaggccgccagttgtggcctccaagttgttagcactagggtgggtggcatccccgaggttctgcccgaaaatctgataatactgtgtgaaccctctgtgaagtcactgtgcgagggccttgaaaaggccatattccagctgaaaagtggtacattacctgcccctgagaatattcacaacattgtcaagacattctacacctggaggaacgtggctgaaaggaccgagaaggtatatgatcgggtgtccgtggaggccgtgctgccaatggataaaaggttagatagactgataagccactgcgggcctgtcactgggtatattttcgccctcctggcagtgtttaactttctgttcttaatcttcctgagatggatgaccccagacagtataatagatgtggcaatcgacgcaaccggccctagaggcgcctggaccaataactattcccatagcaagagaggcggcgaaaacaacgaaatttcagaaacccgc

SEQ ID NO: 250743 - DNA, 1452 bp, synthetic construct
  misc_feature 1..1452: note = Description of Artificial Sequence: Synthetic coding sequence
  source 1..1452: mol_type = other DNA
atggcctgccgcggcggggcaggcaacggccaccgcgcatcagccactctctcgcgcgttagcccaggctcgctgtacacctgccggactaggactcacaatatctgcatggtgagcgactttttctatccaaatatgggaggagtggaaagccacatctaccagctgtcgcaatgcctcattgaaagagggcacaaggtgatcatcgtgacccatgcgtatggcaataggaagggcatccggtacctgacgtccggcctgaaggtctactacctgcctcttaaagtgatgtacaaccagtcgactgcaaccactctgttccattcactgccactcctccggtacatcttcgtgagagagcgtgtgaccatcatccactcgcactcttcgttctccgctatggcccatgatgccctgttccatgccaagaccatgggactgcaaaccgtctttaccgaccattccctctttggatttgcggacgtgtcgtcggtgctcaccaataaactgctcaccgtgtcgttgtgcgacaccaatcacatcatttgcgtctcatacacttcgaaagaaaacactgtgctgcgcgccgcccttaatccggaaattgtgagcgttatcccaaacgccgtcgacccgactgactttaccccggacccgtttcggcgccacgattcgattaccatagtggtggtgtccaggctggtgtacagaaaaggtatcgacctccttagcgggatcatcccagagctctgtcaaaagtaccctgacctgaacttcatcatcggaggagagggaccaaagaggatcatcctcgaggaggtgagagaacgctatcagctccacgaccgcgtgaggctgttgggagccctcgagcacaaggatgtgcggaacgtgctcgtgcagggccatatcttcctcaacacctcccttactgaggccttctgcatggcgatagtggaggctgcatcttgcggattgcaggtcgtgagcacccgcgtcggtggaatccctgaggtgctgccggaaaacctcatcattctgtgcgagccttcggtgaaatcactgtgcgaaggactggaaaaggcgatcttccaactgaagtcaggaactctcccggcccctgaaaacatccataacattgtgaaaacgttctacacgtggagaaacgtggccgagcgcaccgaaaaggtgtacgaccgcgtgtcggtcgaagccgtcctgccgatggacaagcgcctggatcggctcatcagccattgcggacctgtcaccgggtacatctttgcactgctggcggtgtttaacttcctgtttttgatttttcttagatggatgactccagactccatcatcgacgtggctattgacgcgacgggcccgagaggagcttggaccaacaactactcgcattcgaagcggggaggcgaaaacaacgaaatctccgaaacccgt

SEQ ID NO: 250744 - DNA, 1452 bp, synthetic construct
  misc_feature 1..1452: note = Description of Artificial Sequence: Synthetic coding sequence
  source 1..1452: mol_type = other DNA
atggcctgcagaggaggcgctggtaatggtcatagagcctccgctaccttgtccagagtgagtcccggctctctctacacctgcagaaccagaacccataacatttgtatggtgtccgacttcttctaccctaatatgggcggcgttgagtcccacatttaccagttgtcccaatgcctgatcgaacgtggccataaagtcatcattgtcacacacgcatacggaaataggaagggcatcagataccttacatccggcctgaaagtatattaccttcccttgaaggtcatgtacaaccagtccactgcaactactctgtttcacagtctgcctctgcttcgttatatctttgtgcgcgaaagggttacaatcattcactcccattcctccttctcagcaatggctcatgacgcactgtttcacgccaaaacaatgggtctgcagactgtgtttactgaccattccttgttcggatttgcagacgtcagctctgttctcaccaataaattgttgacagtgtctttgtgcgacactaaccacattatctgcgtatcttacacctccaaggagaacactgtcctgcgcgctgctcttaaccctgagattgtgtctgttattcctaatgccgtggatcccaccgactttacacctgatccattcaggaggcacgactccatcacaatcgtggttgtatccaggctcgtctaccgcaagggtatcgacctcttgtctggtatcatccccgaattgtgccagaaataccccgatctcaactttataattggcggcgaaggtcccaaaaggattatcctggaggaagtgagggagagataccagctccatgaccgcgtgcgtcttttgggcgcactcgagcacaaggacgttagaaacgtcttggtccagggtcatatattcctcaacacttctcttactgaggctttctgcatggctatcgtggaggctgcctcctgtggactccaggttgtgtccactagggtcggaggtatacccgaggtgctgcctgagaatctgatcatattgtgcgagcctagcgttaaatccctttgtgagggtcttgagaaggctatcttccaactcaagagcggcacattgccagctccagagaatattcacaacatcgtaaagaccttctacacctggcgtaacgtcgccgagagaactgagaaggtgtacgaccgcgtgtctgttgaggctgtcctgcctatggacaagagattggacaggcttatctcccattgcggaccagttaccggttacattttcgctctgctggccgtgttcaacttcctgttcttgatctttctcagatggatgacacctgactctataattgatgttgccatagatgctacaggacctcgcggagcatggactaataattatagccacagtaagaggggaggtgagaacaacgaaatcagtgagacacgc

SEQ ID NO: 250745 - DNA, 1452 bp, synthetic construct
  misc_feature 1..1452: note = Description of Artificial Sequence: Synthetic coding sequence
  source 1..1452: mol_type = other DNA
atggcctgcagaggtggcgcggggaacggccaccgggcatcagcgactctgtcgagagtctccccaggcagcctctacacctgtagaactcgtacccataacatttgcatggtgtccgacttcttttatccgaatatgggtggcgtcgaatcacatatctaccaattgtctcagtgtctgattgaacgtggacataaggtgattattgtgacgcatgcttacggaaacaggaaggggattcgctatctgaccagtggactgaaggtgtactaccttcccctcaaggtcatgtacaaccaatcaactgctactaccctgttccattcacttcctctgctgcggtacatttttgtcagggagcgggttactatcattcattcccactcatctttctcagcaatggctcacgatgctctctttcatgcaaaaaccatggggctccaaaccgtgtttaccgaccacagcttgtttggatttgcagatgtctcatcggtactcacgaacaaacttctcacggtgtcactgtgcgataccaaccacatcatttgtgttagctacacttctaaagaaaacaccgtcctgcgcgcagcccttaaccccgaaattgtgtcagtgatcccaaacgcggtggacccgaccgactttaccccagacccttttcgtagacatgattcgattaccatcgtcgtggtgtcaaggcttgtgtacaggaagggcattgatctcctctccggaatcattccagagttgtgccagaagtatcccgatttgaatttcatcattggtggtgaaggaccaaagcgtatcattctggaggaagtgagagagcggtaccagctgcatgatagagtcagattgctcggtgcacttgaacacaaggatgttagaaacgttctcgtgcaagggcacatattccttaacacttcgctgactgaagcattctgtatggcgatcgtcgaagccgcatcctgtggactgcaggtggtatccacgcgcgtcggaggaatacctgaggtgttgcccgaaaatcttatcatcctctgtgagccgtcggtgaagtccctctgcgagggacttgagaaagcaattttccaactgaaaagcgggactctgcctgcgccagaaaacattcacaacattgtcaagacgttctacacttggagaaatgtcgctgaacggaccgagaaggtgtacgatagagtgtctgtggaagcagtcctgcctatggacaaacgacttgatagactcatctcgcattgtggacctgtcaccggttacatttttgcacttcttgcggtgtttaacttcctgtttttgatttttcttaggtggatgactcctgattccatcatcgacgtggccatagatgcaactgggccaaggggagcctggactaataactactcacattccaagcgaggtggtgagaataatgaaatatctgaaactaga

SEQ ID NO: 250746 - DNA, 1452 bp, synthetic construct
  misc_feature 1..1452: note = Description of Artificial Sequence: Synthetic coding sequence
  source 1..1452: mol_type = other DNA
atggcatgtcgcggaggtgcaggtaacggacatcgcgcctcagcgaccctttcgcgggtctcgccgggatctttgtatacttgtcgaacgaggacacacaacatctgtatggtctctgactttttctaccctaatatgggtggggtcgagtcgcacatctaccagctcagtcaatgtttgattgagcgtggccataaggtaattattgttacgcacgcttacggaaatcgtaagggcattcgatacctgacgagcggactgaaagtatattacctcccccttaaggttatgtataaccaatcaactgcgactactctgttccactcccttccgctgctgcggtacatcttcgtcagggaacgggtgaccattattcattctcatagttccttttctgctatggcccatgatgcattgttccacgctaaaactatgggcttacaaactgttttcaccgaccactcactttttggttttgccgatgtctcttcagtgctgaccaataaattacttacagtcagcctgtgcgacaccaatcacatcatctgcgtcagctatacctcgaaggaaaacacagtcctgcgtgcagctctcaaccccgaaatcgtttcagtgatccccaatgccgtcgatcctaccgacttcacaccggacccctttaggagacacgactcgatcacgatcgtagtggtctcgcgtcttgtttaccgtaaggggattgatttgttatccggcataatacctgaattgtgccagaaatatcctgacctgaatttcattatcggaggagaagggcccaagcgtatcatcctggaggaagtgcgagagagatatcaactgcatgaccgagttcgactgctgggtgccctcgagcacaaagatgtcaggaacgtcttagtccaaggccatatctttttgaatacatcgctgaccgaggcattttgcatggccattgtcgaggctgcgtcgtgtggattgcaagtcgttagtacgcgtgtggggggaataccggaagttttgcccgaaaacttgatcatcttgtgcgaaccttccgtgaagtctctttgtgagggccttgaaaaggcgatttttcagttgaaatccggtacactcccggctcctgagaacattcataacatcgtcaagacgttctacacttggagaaacgtcgcggagaggaccgaaaaagtttatgatcgcgtctcagttgaagccgttctcccaatggacaagagactcgatcgacttatttcccattgcggaccagtcaccggctacatattcgccctcttggctgtgttcaacttccttttcttgatttttcttagatggatgactcccgactccatcattgatgtggccatcgacgcgaccggcccacggggtgcatggactaataactattcccattcgaagcgtggaggggagaataacgagatctccgaaacccga

SEQ ID NO: 250747 - DNA, 1452 bp, synthetic construct
  misc_feature 1..1452: note = Description of Artificial Sequence: Synthetic coding sequence
  source 1..1452: mol_type = other DNA
atggcctgtcgcggaggagctgggaacgggcatcgtgcttctgcaaccctgagccgcgtcagcccgggcagtctgtacacctgtaggacaaggacccacaacatttgtatggtcagcgattttttttaccccaacatgggcggcgtggagtctcatatctaccagttatcccagtgtctcatcgagcgcggacataaggtgataattgttactcacgcatatggcaatagaaagggtatccggtacctgactagcggcctgaaggtgtactatcttccgctcaaagtgatgtacaaccagtctacggcaaccactctgtttcatagcctccctctgctgcggtacatcttcgtgcgggaacgtgttacaattattcactctcattcttctttcagtgccatggcgcatgacgcgctcttccacgcaaagaccatgggcttgcagacagtgttcactgatcactcactttttgggtttgccgatgtcagttcagtgttaacaaataaactgctcacagtgagtctgtgtgacaccaatcatatcatttgtgtttcctacacgtctaaagagaacacagtactgcgagcagccctaaatcccgaaattgtgtctgtgatcccaaatgccgtggatcctaccgacttcacgccggatccattccggaggcacgactctatcaccatcgttgtggtgagcagattggtatataggaagggaatcgatctgttgagcgggattattccggagctgtgtcagaagtaccccgatctgaacttcatcattgggggggagggtccaaagcgtattatcctggaagaggtgagagagagataccagctgcatgaccgggtgaggctcctgggggccttggagcataaagacgtccgtaacgttctggtccagggccacatattcctgaacacatcactgacggaagcattttgtatggcgatcgtggaagccgcgtcatgtggtctgcaggtcgtgagtacccgggtgggggggatacctgaagtgctgcccgagaacctcattattttgtgcgaacctagcgtcaagagcctgtgtgagggcctagagaaggctatctttcagctgaagagcgggaccctccctgctccagaaaacattcacaatattgtaaaaacgttctacacatggaggaatgtcgccgagcgaacagaaaaagtgtacgacagggtctctgtcgaagccgttctcccaatggacaagcgcttggatcgtctgatttcccattgcggaccggtgaccggttacatttttgccctgctggctgtcttcaattttctgttcctcatctttctgcgttggatgactccagactcaataatcgacgtagccattgatgccacgggcccacgcggcgcctggactaacaactacagccacagtaaaagagggggagagaataatgagattagcgagacacgg

SEQ ID NO: 250748 - DNA, 1452 bp, synthetic construct
  misc_feature 1..1452: note = Description of Artificial Sequence: Synthetic coding sequence
  source 1..1452: mol_type = other DNA
atggcgtgtagaggaggtgcaggcaatgggcaccgggcaagtgctaccctctcaagggtctcccccggctctctgtacacatgccgcacacggacgcataatatctgtatggtctccgatttcttctatcccaacatgggcggggtggaatctcatatatatcagctgagtcaatgtctgattgaaaggggtcacaaggtcataatcgtgactcatgcctatggcaaccgcaagggcattcggtatctgactagcggcctgaaggtgtattacttgccactgaaagtcatgtataaccagagcaccgccaccacactcttccactctctccctctcctgcggtacatctttgtgagagagagggtgaccattattcactctcactcatccttctctgcaatggcccatgacgctttgtttcacgcaaagacaatgggactgcagactgttttcaccgaccattccctgttcggctttgcggacgtgagctcagtgctgaccaataagttgctgaccgtgtctctgtgcgatactaaccatattatatgcgtgtcatacacttctaaagagaacaccgtgcttagagcagctctcaatcctgaaatagtttccgttatcccaaatgctgtggaccctacagacttcacccccgaccccttccggcgccacgactccatcacgattgtagtggtgagcagacttgtttacaggaaagggatagatctgctctctgggattatcccggaactttgccaaaagtatccggatctgaactttatcattggtggtgagggacccaagcgcatcatcttggaggaggtgcgcgagcgctaccagctccacgaccgggtcagactgttgggcgcccttgagcataaggacgtcaggaatgttctggtgcagggccacattttcctcaacacttcactgaccgaagccttttgtatggcaatcgtggaagccgcaagctgcggactccaagtcgtgtccacccgggttgggggaatccccgaggtcctgccagagaacctcataattctgtgcgagcccagcgtgaaaagtctgtgcgagggcctggaaaaagcaattttccagttgaagagtgggactttgccagctcccgaaaacattcacaatatcgttaagacattctatacatggaggaatgtcgcagagcgcacagagaaggtctatgatagagttagtgtcgaggcagtgctccctatggataagcggttggatagacttatctcccattgtgggcctgtgaccgggtatatctttgcgcttcttgccgttttcaatttcctgttcctgatcttcctgaggtggatgacacccgacagtataatagacgttgcgattgatgccacaggtcctaggggagcctggactaacaactattcccattctaagaggggaggggagaataacgagatttctgagacgaga

SEQ ID NO: 250749 - DNA, 1452 bp, synthetic construct
  misc_feature 1..1452: note = Description of Artificial Sequence: Synthetic coding sequence
  source 1..1452: mol_type = other DNA
atggcatgtcgcggtggggcaggtaacggacatcgcgcatctgcaactctctcgagggtgtcaccgggatccctgtatacttgccggactagaactcacaatatctgtatggtgtcagacttcttttaccccaacatgggaggcgtggaatcgcacatttaccaactctcgcagtgtctgatcgaaaggggacacaaggtgatcatcgtgacccacgcctacggaaatcggaaagggatcagataccttacttccggactgaaggtgtactacctgcccctgaaagtaatgtacaatcaatccaccgccaccaccctctttcatagcctgccactgcttaggtacatttttgtgagagaacgagtcaccattattcattcgcattcctccttctcggcgatggcgcacgacgcactttttcatgccaagaccatgggactgcaaactgtgtttactgaccattcgctctttggatttgccgatgtctcgtccgtccttaccaacaaacttttgacggtcagcttgtgtgataccaaccatatcatctgcgtgagctacacgagcaaggagaacactgtgcttagagcagcactgaatcccgagattgtgtcagtcatcccaaacgcagtcgacccgaccgattttaccccagatccatttagacgccacgatagcatcaccattgtggtggtgtcacgactggtgtaccgaaagggtatcgatctgctgtcgggcatcatcccggaattgtgtcaaaagtaccctgatctgaatttcatcattgggggagaggggccaaaacgaataatcctcgaagaggtcagagaaagataccagctccatgatcgggtccgccttctgggagcacttgagcacaaggacgtgcgaaatgtgctcgtgcaagggcatatcttccttaatacctcgctcaccgaggccttctgtatggcgattgtggaggcagcatcgtgcggcctgcaggtcgtctctacccgggtcggtgggattccagaagttctccctgaaaacctgattattctctgtgagcctagcgtcaagagcctctgcgaaggtcttgagaaggcaatcttccagctcaagagcgggaccctccctgcacccgagaatattcacaatatcgtgaaaactttctacacttggagaaacgtggctgaacggactgaaaaggtttacgaccgagtgtcggtcgaggcagtgctgcccatggataagcggttggaccggctgatctcacactgtggtcctgtgaccgggtacatcttcgctcttctggcagtgtttaacttccttttcctgatctttctgagatggatgacccccgactccataatagatgtggcaatagatgcgaccggacctaggggagcctggaccaacaactactcgcattcgaagagagggggagagaacaacgagatctcggaaacccgg

SEQ ID NO: 250750 - DNA, 1452 bp, synthetic construct
  misc_feature 1..1452: note = Description of Artificial Sequence: Synthetic coding sequence
  source 1..1452: mol_type = other DNA
atggcctgtcggggtggcgcaggaaacgggcatcgagcctcagccaccctgtcccgggtgagccccggaagcctctacacatgtagaactagaactcacaatatctgtatggtttctgattttttttatccaaatatgggcggagttgaatcccacatttaccaactttcgcagtgcctgatagaaaggggccataaggtgattatagtgacgcacgcctacgggaaccgaaaggggatccgttatctgacgagcggtctgaaagtttattaccttccattgaaagtgatgtataaccagagcaccgccacaacactctttcattcattacccctcttgcggtatattttcgtccgcgagcgggtaaccatcatccactctcattcctcgttctctgcaatggctcacgatgcgctgttccatgccaagacaatgggacttcagacagtatttaccgaccatagtctcttcggcttcgcagatgtgtcttctgtgcttacaaacaagttactgacagtgtccctgtgcgacacaaaccatatcatttgcgttagctacacaagcaaggaaaatacagtgctgcgggcagcactcaaccccgagattgtgtcagtgattccaaacgcggttgacccaaccgactttaccccagacccttttcgaaggcatgattccattacaatcgtcgtcgtgtctaggttggtgtaccgcaaggggattgacttactgtccggcatcattcctgaactctgtcagaagtatccagatttgaactttataattgggggagaaggtccaaagcgcatcatcctggaagaagtgagggaaaggtaccagctacacgaccgggtccgattattaggagcgctggagcacaaggatgttaggaacgtgctggtgcaagggcacatcttccttaacacttctctgacggaggctttttgtatggcaatcgtagaagcagcatcctgtggactccaggtcgtctctaccagggtgggcggtattccagaggtgctcccagagaacctgatcattctgtgtgaacccagcgtgaaatcgttgtgcgagggcctcgagaaggcaatttttcagcttaagtccggtaccttgccggctcccgagaacattcacaatattgtgaagacattctatacttggcggaacgtggcagaacggaccgagaaggtttacgaccgcgtcagtgtggaggccgttcttccaatggataagaggctggatcggctgattagccactgcggccccgtcacaggatatatcttcgccttattggcagtgttcaatttcctgttcttgatattcctcaggtggatgacccccgacagcatcatcgatgtcgctatcgatgccacagggccccgtggcgcttggacaaataactattcccattccaaaagggggggtgagaacaatgaaatctctgagaccagg

SEQ ID NO: 250751 - DNA, 1452 bp, synthetic construct
  misc_feature 1..1452: note = Description of Artificial Sequence: Synthetic coding sequence
  source 1..1452: mol_type = other DNA
atggcctgtcgcggtggcgctggcaacgggcatagggccagtgcaaccttgtccagagtgtcaccggggtctttgtacacttgccgcacaagaacacacaatatttgcatggttagcgatttcttctacccgaatatggggggggtggagagtcacatctatcaactgagccagtgtctgatagagcgcggtcacaaagtaatcatcgtcacacatgcctacggcaacagaaagggcatccgctatctgacatctggtctgaaagtctattatctccccctgaaggtcatgtataaccagtctactgccaccacactcttccactccctccccctgctccggtatatcttcgtacgagagcgcgtcaccatcatccattcacattcctcattcagcgccatggcccacgatgccttgttccacgcaaagactatgggtctgcaaacagtgttcacggatcattccctctttggtttcgccgacgtgagcagtgttcttacaaacaagctgctgaccgtcagcctgtgtgatacaaaccacataatctgcgtgtcctacacatccaaagagaacaccgtgctgcgggctgccttgaatccagagatcgtgagcgtgatacctaatgccgtcgatccaaccgatttcactccagacccattccggcgccacgattccatcaccatcgtagtggtgtctcgcctggtgtaccggaagggtattgatctcctctcagggattatacccgaactgtgtcaaaaatatcccgatctcaacttcatcattggcggtgaagggccaaagaggattatacttgaagaagtgagagagcgataccagctccacgatcgcgttcgccttctgggggccctggaacacaaggatgtgagaaacgtgttggtgcagggtcacattttcctgaacaccagtcttactgaggccttctgtatggccattgtggaagccgcttcctgcggccttcaggtggtgtctacacgggtggggggcatccctgaagtgctccccgagaatctcatcatattgtgcgagcccagcgtgaaaagcctttgtgaaggactggaaaaagcaatattccaactcaaaagtggaacgcttccggctcctgagaacattcacaacatagtaaagacattctatacttggcggaatgtggcagaaagaactgagaaggtctatgaccgggtgagcgtcgaggcagtgctgcctatggacaaaagactcgataggctgataagtcattgcgggcccgtaacgggctatatcttcgcgttgcttgccgtgttcaatttcctgtttttgatctttcttcggtggatgaccccagattctatcattgatgttgctatcgatgctacagggccccgaggggcctggactaataactatagccattctaagcgaggaggagagaacaacgagattagcgaaacaaga

SEQ ID NO: 250752 - DNA, 1452 bp, synthetic construct
  misc_feature 1..1452: note = Description of Artificial Sequence: Synthetic coding sequence
  source 1..1452: mol_type = other DNA
atggcgtgtagaggaggagctgggaatggtcatcgcgccagcgcaacgttgagcagagtctcacccggtagcctgtacacttgtcgaactcgcactcacaacatatgcatggtgtcagactttttctacccaaatatgggaggagtggaatcacacatttatcagcttagccagtgtcttattgaaagagggcataaggtgataattgtcacgcacgcctatggtaacagaaaaggaatccgttaccttacttcgggactgaaggtgtattaccttcctctgaaagtgatgtacaaccaatcgactgcgaccaccctgtttcatagcctgcctttgcttcgctacatttttgttagagaacgagttaccattattcattcccactcctcgttttccgcaatggcccatgatgccctgtttcatgccaagactatggggctccaaacggtgtttaccgaccattccctgtttgggttcgcagatgtgagctcggtgctgacgaataagctgctgaccgtgtccctttgtgatactaaccacattatctgtgtgtcctacacttcaaaggagaacacggtcctgagggcggccctgaatccggaaattgtgtccgtcattcctaatgcggtggatcccaccgattttactccggatccatttcggcgccacgattcgattaccatcgtcgtcgtgtcgagactggtgtaccgaaagggtatcgatctcttgtcgggaattatccctgagctttgtcaaaagtacccagacctcaacttcatcattggaggcgagggtccaaagagaattatcctcgaagaagtgagagaaaggtaccagcttcatgatagagtcagacttcttggggctctcgaacataaagatgtgaggaatgtgcttgtgcagggccacatatttctgaacacttccctgaccgaggccttttgtatggcaatcgtggaagcagcatcctgcggtctgcaagtggtgtcaactcgcgtcggaggcatcccagaggtgctccctgagaatcttatcatcctgtgcgagccctcggtcaagtcactgtgcgaaggacttgagaaggccattttccaactgaaatccggaaccctccccgcgccagagaacattcacaatatagtgaaaactttttacacctggcgtaacgtggcagaaagaaccgaaaaagtctacgaccgcgtcagcgtggaagccgtccttcctatggacaagaggctggacagactgatttcgcattgtgggcctgtgacgggatacatttttgcacttctggcagtgtttaactttctgttcctgatctttctgcgatggatgacccctgattccattattgatgtggcgatagatgccactggcccgagaggagcctggaccaacaattacagccattccaagcgaggaggagagaacaatgagattagcgagactaga

SEQ ID NO: 250753 - DNA, 1452 bp, synthetic construct
  misc_feature 1..1452: note = Description of Artificial Sequence: Synthetic coding sequence
  source 1..1452: mol_type = other DNA
atggcatgccgcggaggagccggaaacggccaccgcgcttcggccacactctcacgagtgtctcccggcagtctttacacgtgcagaactcgcacccacaatatttgcatggtgtctgatttcttctatccgaacatgggtggcgtagagtcccacatctatcaattatcccagtgtctgatcgaacgcggtcataaagtgatcatcgtcactcatgcctacggcaatagaaaggggattagatacctcactagcggtttaaaagtctattaccttccgctgaaagtcatgtataatcagtctacagctaccactttatttcattccttaccactgttgagatacatttttgttagagaaagggtgacaattattcatagtcactcaagtttcagcgccatggcacacgatgcgctcttccacgcaaagaccatgggattgcagaccgtttttactgatcatagcctatttggttttgcggacgtcagctcggtgctgacaaacaaactgttgacggtctccctgtgtgataccaaccacatcatctgtgtctcctacacgtctaaggagaacaccgttctccgtgcagcccttaatcctgaaattgtgtcagtcattccgaatgcggtggatcctaccgacttcacacctgatcccttcagacggcatgacagtatcacgatagttgtggtgagccggttggtgtacagaaagggcatcgatctgctgagtgggattatccccgagctgtgccagaaatacccagatctgaacttcatcattggcggcgagggcccaaagagaatcattcttgaggaagtccgtgagcgttatcagctgcacgatcgtgttagattgcttggggcactagagcacaaagacgtccggaatgtcctagtgcaggggcatattttcttaaacacctcactgactgaggccttctgtatggccattgtcgaggctgccagttgtggacttcaggtcgtgtcgactagggtaggaggaataccggaagtcctgcctgaaaaccttatcatcctatgtgagcccagcgtgaagagtttgtgcgaaggccttgaaaaagcaattttccaactgaaatcaggcaccctcccagctcccgagaatattcacaatatcgtgaaaaccttctacacatggcggaatgtggccgagaggacggaaaaagtgtatgacagagttagcgtcgaggccgtcctgcctatggacaaaaggttagatcgcctgataagtcattgtggtcctgtcaccggatacatattcgcgttactggccgtcttcaacttcttatttttgattttcttgcgttggatgactccagactcgattatcgacgtagcaattgatgctacagggccgcggggagcctggactaataactattcccactccaaaagaggcggagaaaataacgaaataagcgagacacgg

SEQ ID NO: 250754 - DNA, 1452 bp, synthetic construct
  misc_feature 1..1452: note = Description of Artificial Sequence: Synthetic coding sequence
  source 1..1452: mol_type = other DNA
atggcctgtcgcggaggtgctggtaacggacatcgcgcgtccgccacactttctcgcgtctcgcctggtagtctttacacctgcagaacgcggacccataacatctgtatggtttccgacttcttctaccccaacatgggcggagtcgaatcgcatatttatcagttgtcccagtgtctgatcgaacgaggccataaagtcataatcgtgacacatgcctacgggaaccggaaagggatacgctacctgacctctggtttaaaggtgtattacctgcccctgaaagtgatgtacaatcagagcactgccacaaccctgttccactcactccctctgctccgctatatctttgttagagagcgggtcaccatcattcacagccactcgtccttctccgctatggcccacgacgcattgtttcacgcgaagacaatgggcctccagacagtgtttactgaccattctcttttcggcttcgctgatgtgtcctcagtgttgactaataagctgctgaccgtgtcactttgcgatacaaaccacatcatatgcgtgagttatacatctaaggaaaacactgtactgcgcgctgcattgaacccagagatcgtatccgtgattcccaatgcggtggatcctacagatttcacccccgatccgtttcggaggcacgatagcataaccatagttgtcgtatcgaggctggtctatcgcaaggggattgatctgttatccggcatcatccccgagctgtgtcagaagtaccctgaccttaactttattataggtggagaagggcctaaaaggatcatcctggaagaggttagggagcggtatcagctgcacgacagagtgcgcttgttaggggccctggagcacaaggatgttagaaacgttcttgtccagggacacatttttttgaacacctccctgactgaagccttctgcatggctatcgtcgaggcagcatcctgcggactccaagtagtgagcacacgcgtgggcggtatcccagaggtgctacccgagaacctcatcatcctgtgtgaaccctccgtgaagagcctctgcgagggattggaaaaggcaatttttcagctcaagtccgggactctaccggctcccgaaaatattcataatattgtcaagacattttacacttggaggaacgtggccgaacggactgagaaagtctacgatcgggtttctgtcgaagctgtactcccaatggacaaaaggctcgatcggttgatatcgcattgcgggccagtgactggctatattttcgccctactcgcagtcttcaatttcctgttcctgattttcctccggtggatgacccctgattcaattattgatgtcgccatcgacgccacgggtccgcggggggcttggaccaataactacagtcacagcaagagaggcggggaaaataacgaaatctctgaaacgcga

SEQ ID NO: 250755 - DNA, 1452 bp, synthetic construct
  misc_feature 1..1452: note = Description of Artificial Sequence: Synthetic coding sequence
  source 1..1452: mol_type = other DNA
atggcatgccgcggaggcgccggtaatggacaccgcgcgtccgccaccctttcaagggtgagccctggaagcctttacacctgtaggactcgcacgcacaacatctgtatggtgagcgactttttctatccgaacatgggaggggtggaatcccacatctatcagctgtcgcagtgtctgatcgaaagaggacacaaagtgatcatagtgacccatgcctacggaaatcggaaaggtatccggtacctcacctcgggactgaaggtgtactacctgccgctcaaagtaatgtacaaccagtccactgcaaccaccttgtttcattccctgcccctcctgagatacatcttcgtgagagaacgcgtgaccatcatccactcgcattcctcgttcagtgcaatggcccatgacgccctgtttcacgcgaaaacgatgggcctgcaaaccgttttcactgaccactcacttttcggattcgctgatgttagctctgtgctgactaacaagctcctgactgtgtcactgtgcgacaccaaccatatcatttgtgtgtcgtacacttctaaggagaacaccgtgcttcgggcggcgctcaatcccgaaatcgtctcggtcatcccaaacgccgtggatcctaccgactttactccggatccgtttagacggcacgattccatcacgattgtagttgtgtcgagactcgtgtaccgcaagggaattgacttgctgagcggcatcattccagaactctgccaaaagtacccggatctgaactttatcatcggaggcgaaggtccgaagcgcatcatcctggaagaagtgagagagcggtatcaactgcacgacagagtgaggcttctcggggcccttgagcacaaggacgtgcgcaacgtgctggtgcagggtcatatcttcctcaacacgtcattgaccgaggcattctgcatggccatcgtcgaggccgcctcgtgcggcctgcaggtcgtgagcactcgagtcgggggtatccctgaggtcctgccggagaacctcatcattctgtgcgaaccaagcgtcaagtccctctgcgaagggctcgagaaagctattttccagctcaagtccggaacgctccccgctccagagaatatccacaatatcgtaaagactttctacacttggcggaacgttgcggaacgaactgaaaaggtctacgaccgtgtctcagtggaagccgtgctgccaatggacaagaggctcgaccggctgatatcgcattgcgggccggtgaccggctacattttcgcgctgttggctgtattcaatttcctgttcctgatcttcctccgatggatgacgcctgatagtatcatcgatgtggcgatcgacgcaactggcccgcggggagcttggaccaacaattactcgcacagcaaacgcggcggagagaataacgagatctccgaaacccgt

SEQ ID NO: 250756 - DNA, 1452 bp, synthetic construct
  misc_feature 1..1452: note = Description of Artificial Sequence: Synthetic coding sequence
  source 1..1452: mol_type = other DNA
atggcctgccggggaggggctggaaacggacacagagcttccgctacactcagcagggtcagtccagggtcactctacacctgccggactaggacccataatatctgcatggtgtcagatttcttttaccccaatatgggtggggtggagagccacatttatcaactgagccagtgtttgatcgaacgcggtcataaggttattatcgttacgcacgcttatggaaatcgcaaagggatccgatatttgacgtcagggttgaaggtgtactacttacccctgaaggtgatgtataaccagagcactgccaccactctttttcacagcctccctctgctcaggtacattttcgtacgcgagagggtgaccataatccattcccatagttccttctccgccatggcacatgacgcactgttccatgctaaaaccatgggactgcagacggtgttcaccgaccatagtctatttggtttcgccgacgtatctagcgtgctcaccaataaactgcttacagtgtcactgtgcgataccaaccacatcatttgcgtgtcatacacttccaaagagaacaccgtgctcagggcggcattaaatccagaaattgttagcgtgatcccaaacgctgtcgatcccacagatttcacgcctgacccttttcgcagacatgactccattaccatcgtggtggtgtctcgcctggtgtacaggaagggcatcgatctattgtccggcatcattcccgaattgtgtcaaaagtatcccgatctaaatttcattataggtggagagggtcccaagcgtataatcctggaggaggtgagagaaaggtaccagcttcacgacagggttcggctgttgggggctctggaacacaaggatgtacggaacgtcttggttcaggggcacatttttctcaatacttcattaaccgaggctttctgcatggctatagttgaagcagcatcctgcgggcttcaggtggtctccacccgcgtgggcggtattcctgaggtgctgcccgagaaccttattattctgtgtgagccatctgttaagtctctttgcgagggcctggagaaagcaattttccagctgaagagtgggacgttgcccgccccggagaacattcataatatagtgaaaaccttctatacatggagaaacgttgcagaacgaacagagaaggtctacgaccgcgtcagtgttgaggccgtgctaccgatggacaagagactggatcgcctaattagccactgtggacctgtcaccggatatatcttcgccctgcttgctgtgtttaacttccttttcctcatcttcttacgatggatgacccctgattccattattgacgtggctatagatgccacaggacctcggggtgcctggaccaataattacagccacagcaagcggggaggtgaaaataacgagatttctgagacacgg

SEQ ID NO: 250757 - DNA, 1452 bp, synthetic construct
  misc_feature 1..1452: note = Description of Artificial Sequence: Synthetic coding sequence
  source 1..1452: mol_type = other DNA
atggcgtgcagaggaggagcaggaaacggtcatcgcgctagcgccaccctctcccgggtgagcccagggagcctgtacacttgtcgaacccgcactcacaacatctgtatggtgtcggatttcttctacccaaacatgggaggcgtcgagtcgcatatctaccagctttcgcagtgcttgatcgaacgcggacataaggtgatcatagtcacccacgcgtacggcaacaggaaagggatcagatacctcacgtccggcctgaaagtctattacctccctctgaaggtgatgtacaaccagtcgaccgccaccactcttttccacagcctgcccctcctgagatacatctttgtacgggaaagggtgaccatcatccactcccactcgagcttttccgcgatggcacatgacgcgctgtttcacgccaagactatgggtctgcagactgtgttcaccgatcactccttgttcggcttcgcggatgtgtcctccgtcctgactaataagctgcttaccgtgagcctctgtgacacgaatcatatcatctgcgtctcctacacctctaaggaaaacactgtgctgcgggctgcactgaatccagagatcgtctcggtgatccccaatgccgtggacccgactgatttcaccccagatcctttccggcgtcacgattcaatcactatcgtcgtcgtgtcaagactcgtgtacaggaaggggatcgacctgctgagcggcatcatcccggaactgtgtcagaagtatccagacctgaatttcattatcggtggagagggaccgaagcggatcatcctcgaagaggttcgcgagagatatcaactgcatgacagggtgaggctgctgggagcgctcgagcacaaagacgtgcgcaacgtgctcgtgcaaggccatatctttttgaacacttcacttaccgaggcgttctgcatggccattgtggaagccgcctcgtgtgggctgcaggtggtcagcactcgcgtgggaggaattccggaagtgctcccggagaacctcatcattctgtgtgaaccgagcgtgaagtcgctctgcgaaggcctggagaaagctatcttccagcttaagtccggcacgctgccggcacctgagaatattcacaacatcgtcaaaaccttttacacttggcgaaacgtggcggagagaactgaaaaggtgtacgaccgggtgtcggtggaggccgtcctgccgatggacaagaggctggaccgtctgatcagtcactgtggaccggtgaccggatatatctttgccctcttggctgtgttcaattttctcttcctcatctttcttagatggatgaccccggatagtatcatagatgtggctatcgatgccactggcccacgcggagcctggacgaacaattactcgcactcgaaacgcggaggagagaacaatgaaatctcagaaaccaga

SEQ ID NO: 250758 - DNA, 1452 bp, synthetic construct
  misc_feature 1..1452: note = Description of Artificial Sequence: Synthetic coding sequence
  source 1..1452: mol_type = other DNA
atggcatgcaggggaggagcgggaaacggacaccgtgcctccgccactctctcccgagtgtctcccggatcactctacacttgcagaactcggacgcacaatatctgtatggtgtcggacttcttttacccaaacatgggaggcgtcgaatctcatatctaccaactgtcccagtgcttgattgagagagggcacaaagtcatcatcgtgacccatgcgtatggtaatcggaaaggcatccgctacttgacttccggtctgaaggtctattacctcccgctcaaggtgatgtacaaccaaagcactgcgactaccctgttccacagcctgccactcctgcggtacattttcgtgcgagaacgcgtgactatcatccacagccattcctcattctccgcaatggcccatgacgcgttgttccacgcgaaaaccatgggactgcagaccgtgttcaccgatcacagcctttttggattcgccgatgtgtccagcgtgctgactaacaagttgttgaccgtgtcactctgcgacactaaccacattatctgcgtgtcctacacctcgaaggaaaacactgtcctgcgagcagcactgaaccctgaaatcgtgtcggtgatcccaaacgccgtcgatccgaccgactttactccggacccgtttcggcgccacgacagcatcactatcgtcgttgtctcacgcctggtgtaccgtaagggtatcgatctgctgtccggcatcattcccgagctttgtcagaaataccctgacctgaatttcatcatcggaggtgaaggacctaagcgcatcatactggaagaagtgagggagcgctaccagctgcatgaccgcgtccggctgcttggggcattggagcataaagatgtgagaaacgtcctcgtacagggtcatatctttctgaatacgtctctcactgaggccttctgcatggcaattgtcgaggccgcttcctgtggtctgcaggtcgtctcaacccgggtggggggaatccctgaggtgttgccagagaatctgattatcctttgcgaaccgagcgtgaagtcgctgtgcgagggattggaaaaggccatatttcaactcaagagcggaacgctgccagcccccgaaaacatccataacattgtgaaaactttctacacttggcggaacgtggcggaaaggaccgaaaaggtgtacgacagggtttcggtcgaggcggtcctccccatggataagcgtctggatcgactcatttcgcactgcgggccggtgaccggctacatcttcgcccttctggccgtctttaacttccttttcttgattttcctgagatggatgaccccggacagcatcatcgatgtggctatcgatgccacgggaccgcggggagcatggaccaataactactcacactcgaagagaggtggggagaacaatgaaatctctgaaacccgg

SEQ ID NO: 250759 - DNA, 1452 bp, synthetic construct
  misc_feature 1..1452: note = Description of Artificial Sequence: Synthetic coding sequence
  source 1..1452: mol_type = other DNA
atggcttgccgaggtggcgccggaaatggacacagggccagcgcaacactctccagagtgtcacccggctctctgtatacctgccggacccgaacgcataatatttgtatggttagcgatttcttctatcccaatatgggcggcgtggagtcccacatataccagctgtcccagtgcctaattgagagggggcacaaggtcatcatagttacccacgcgtacggaaacagaaaaggaatccggtacttgacctccggtctgaaggtctattacctgcccctgaaagtgatgtataatcagagtaccgccacgacacttttccattctctcccattgctgcggtacatatttgtccgcgagagggtgaccatcatacacagtcacagcagctttagcgcaatggcacatgatgcgctgttccacgcaaagactatgggcttgcagacagtgtttacggaccatagccttttcggttttgcggatgtgagcagcgtgctgacgaacaaactgctaaccgtatctctctgtgatacaaaccatattatctgcgtctcttatactagtaaggagaataccgtgctgcgggccgctctgaacccagagattgtgagcgtcatcccaaacgctgtggatcctaccgactttacacctgacccatttcgtaggcatgattcaatcaccatagtagtggtgtctaggctggtctacagaaaaggcattgacttgctgagcggcattattccagaactgtgccagaaataccccgacctgaatttcataattggcggagaaggtcccaaacgcattattctagaggaagtcagagaacggtaccaactccacgacagggtgcggctacttggcgctctggagcacaaggacgtgaggaatgtgctggtgcaaggtcacatcttcttgaacacttccttgactgaggccttctgcatggccattgtcgaggccgcctcctgcgggctccaagtggtgagtacccgcgtgggcggaatcccagaggttttgcccgagaacttgattatcctttgcgaaccatctgttaagtcactctgcgaaggcctggagaaagctatatttcagctcaaaagcggcacactgccagcccctgagaacattcacaacattgtgaaaacgttttacacgtggaggaacgtggctgagcgcacagagaaagtgtacgatcgcgtatctgtcgaagccgttctcccaatggataaacgcctggatcggttaatcagtcattgtggccccgttaccggatatatcttcgctttgctggccgtttttaattttctttttcttatcttcctccgatggatgacacccgattctatcatcgacgtagcaatcgatgccaccggcccacgcggcgcctggacaaataactatagccactctaagcgaggaggagaaaacaatgagatcagcgagactcgc

SEQ ID NO: 250760 - DNA, 1452 bp, synthetic construct
  misc_feature 1..1452: note = Description of Artificial Sequence: Synthetic coding sequence
  source 1..1452: mol_type = other DNA
atggcttgccgcggcggtgccgggaacgggcaccgcgccagcgccaccctgtcgcgtgtctctccgggctcgctatacacttgccgcacccgtactcacaacatatgtatggttagtgattttttctatccaaatatgggcggggtcgagtcccacatctaccagctctcccaatgcctgatagaaagaggccacaaggttattatagtgacccatgcttatggtaatcggaagggtatacgctacctgaccagcggcctgaaagtgtactacctgccgcttaaggtgatgtataaccagtcaaccgccaccactttgtttcatagcctccctctgctccgttacatattcgtgcgcgagcgtgtgaccattattcactcgcactcaagcttctccgctatggcgcacgacgcactgtttcacgcgaagactatgggactgcaaaccgtctttaccgaccacagtttgttcggttttgcggatgttagcagcgtgctgactaataaactcctgacagtgagcctgtgcgacaccaatcacataatttgcgtgagctataccagtaaagaaaatacagttctccgcgcagcgctcaaccctgagattgtttctgtgattccgaacgctgttgaccctaccgacttcactccagacccattccgccgacacgactccatcacgatcgtggtcgtgagccgcttggtgtacaggaaaggcatcgacttgctgtctgggatcatcccggagttatgtcaaaagtatccagacctgaattttattatcgggggtgagggacccaaacgcataatattggaagaagttcgcgagcgataccagctgcacgatcgcgttcgcttgttgggcgctttggaacataaagatgttcgaaatgtgctggtccagggccacatctttctgaacacttcactcacggaagcattttgtatggcaatcgtggaggcagccagttgtggtctgcaggtggtgagcacccgagtaggtggcattccagaggtgcttcctgaaaatctgattatactctgcgaaccgagcgtgaaaagcctgtgcgagggactggagaaggcaatttttcagctgaaaagtggcaccctccctgctcctgagaacattcacaacatcgttaagacattctacacctggcgcaacgtcgcagagcgcactgagaaggtctacgaccgggtgagcgttgaggctgttctgccgatggataaacgcctggatcgcctgattagccactgtgggccagtgacgggctatatatttgcactgttggcggtttttaacttcctcttcctcattttcctgagatggatgaccccggatagtattatcgacgttgcgatcgatgccactggaccgagaggtgcctggactaataactactcgcactctaagcgcggcggtgagaataatgagatctcggagactcgt

SEQ ID NO: 250761 - DNA, 1452 bp, synthetic construct
  misc_feature 1..1452: note = Description of Artificial Sequence: Synthetic coding sequence
  source 1..1452: mol_type = other DNA
atggcatgcaggggtggagcgggaaacggtcatagagcatcagcaaccctttcgcgggtgtcacctggaagcctctacacttgcaggacccgcacccataacatttgcatggtgagcgactttttctacccaaacatgggaggagtcgaatcccacatctaccagttgtcgcagtgtctgattgagcggggtcacaaagtgatcattgtgacgcacgcatacgggaacagaaagggaatcagataccttacctccggactcaaggtctactacctgccccttaaggtgatgtacaaccaatcgactgcaaccaccctttttcactcacttccactgcttagatacatattcgtcagagagagagtgaccattatacatagccactcgtcgttttcggctatggcacacgacgcactcttccatgcaaagaccatgggcctgcagactgtgtttacggatcactcgctgtttgggttcgcagatgtctcttcagttctcactaataagctgttgactgtgtcgctgtgtgacaccaaccatatcatctgcgtgtcctacacttcaaaagagaacactgtgctccgtgctgcgttgaacccagaaattgtgtcggtgattccgaacgcagtggatccgactgatttcacccccgatccttttagacgacacgattcgatcaccattgtcgttgtgtcacgtctggtgtatcgcaaaggtattgacctgctgtccgggattattcctgaactgtgtcagaaatatccggatttgaatttcattattggaggcgaagggcctaagcgcatcattctcgaagaggtccgtgaacggtaccaactccatgaccgcgtcagattgcttggcgcgcttgaacataaagacgtcagaaacgtccttgtgcaaggccatatctttcttaacacctccctgacggaggctttctgtatggccatcgtcgaggcagcatcctgtggcctgcaagtggtgtcgactcgcgtgggcgggattcctgaggtgcttccagaaaatctgatcattctgtgcgaaccatccgtgaagtctctttgcgagggcctggaaaaggcaatcttccagctgaaatcaggtactctccctgcaccagaaaacattcataacatcgtgaaaaccttttacacctggcgtaatgtagcagagcgaaccgagaaagtgtacgaccgggtgtcggttgaagcagtgcttcctatggacaagaggcttgatcggctgatatcccactgtggaccggtcactggatacattttcgcactgctggcagtgttcaattttctgtttctgattttcctgaggtggatgaccccagatagcattatcgacgtggcaatagacgcaaccggacctagaggggcatggactaataactactcacactcaaaaagaggaggagagaacaatgagatttccgagactaga

SEQ ID NO: 250762 - DNA, 1452 bp, synthetic construct
  misc_feature 1..1452: note = Description of Artificial Sequence: Synthetic coding sequence
  source 1..1452: mol_type = other DNA
atggcctgcagaggcggagccggcaatggccacagggcttccgcaacgcttagtagggtctcccccgggagcctttacacttgcagaacacgcactcataatatttgcatggtttctgatttcttttaccccaatatgggcggtgttgagtcgcatatctatcagttgtctcagtgcctgatcgagaggggccataaagtaataatcgtcacacatgcctacggtaatcggaaaggcatccgctatctgacttccggccttaaggtgtattacctccccttgaaggtgatgtacaaccagagcaccgccactacattgttccatagcctgccgttgctccgctatatctttgtgcgagaacgagtgaccattattcactcccactcctccttttctgcaatggcacacgatgccctgttccatgccaagacaatgggccttcagacagtcttcactgatcacagcctgttcggctttgccgacgtctcttcagtgctgaccaacaagcttttgaccgtttctttatgtgacacaaaccacatcatctgtgtaagctacacgagcaaggagaacactgtactcagagcggccttgaatcccgaaattgtgtcggtgatcccgaacgcagtcgacccaacagacttcaccccggaccccttccggcgccatgactctattacaatcgttgtggtctcacgattagtgtacagaaaagggatcgacctgcttagtggcataattcccgaactctgtcagaaatatcccgaccttaattttatcatcggcggcgaaggtcccaagcgtattatcctggaagaggttcgagaacggtatcagttacacgacagagtacgtctgttgggcgccctggaacacaaggatgttagaaacgtgctggttcaggggcacatttttttgaacactagccttactgaggcattttgcatggccattgttgaggccgcttcgtgcggacttcaggtcgtaagtactagagtgggaggcatacctgaggtgctcccagagaacctgatcattctctgcgagccttccgtaaagagtctgtgtgaaggcctagaaaaggctatatttcagttgaaatccggcacgctacccgcccctgaaaacattcacaacatcgtcaagactttctatacatggagaaacgtggccgaacgaacagagaaagtgtatgatcgggtgagcgtggaagcagtactccctatggataaacgactggatcggctgatctcccactgcgggcccgtgacaggctatatcttcgccctgctggccgttttcaatttcttatttcttattttccttcggtggatgacaccggactctatcatagatgtggctatcgatgcaacaggaccacgcggcgcctggaccaataactattctcattcgaagagaggcggtgaaaacaacgaaattagcgaaaccagg

SEQ ID NO: 250763 - DNA, 1452 bp, synthetic construct
  misc_feature 1..1452: note = Description of Artificial Sequence: Synthetic coding sequence
  source 1..1452: mol_type = other DNA
atggcatgtcgcggtggggcagggaacggtcatagagccagcgccaccctctctagggtcagcccggggtccctgtacacttgtcggacccgaactcataacatctgtatggtgtcggactttttctacccaaatatgggtggagttgaatcccatatctaccagctctcgcaatgtctgatcgaacgaggacacaaggtgatcattgtcacccacgcatacggcaatcgaaagggcatacgctacctgaccagcggactcaaggtgtactacctgccactcaaagtgatgtacaaccaatccactgctacgactcttttccactctctgccacttctgcgatacatctttgtccgggaaagggtgaccattattcattctcactcatccttttccgcaatggcacatgacgcactcttccatgccaaaactatggggctccagaccgtgttcactgatcattcgctttttggttttgcggatgtttcgagcgtgcttaccaacaagttgctgaccgtgagcctttgtgatactaatcacattatctgtgttagctacacctctaaggagaatactgtgcttagagcggcactgaaccctgaaatagtgagcgtgatcccaaacgccgtcgatcccactgattttaccccagacccatttcggcggcacgattcaatcaccatcgtggtggtgtcaaggctggtgtataggaaggggatcgatctcctgtccgggattataccggagctttgccagaagtaccccgacctcaacttcatcattggaggagaggggcctaagaggataatcctcgaggaggtccgtgaacgctatcaactccatgatagagtgcggcttctgggagcgctggagcataaggatgtgagaaacgtccttgtgcaaggacacatctttcttaatacttccctcactgaagcattctgcatggcaattgtggaagcagcatcgtgcggcctccaagtcgtgtcaacgcgggtgggtggaattccagaggtcctgcctgaaaaccttatcattctctgtgaaccttcggtgaaatcgctctgcgaagggctcgaaaaggcgatttttcagctcaaatctggaaccctgccggctcccgagaacattcataacattgtgaaaaccttttacacctggcgcaacgtggcggaacggactgaaaaggtgtacgacagagtgtccgtcgaagccgtactgcctatggataagaggctcgatcggctgatttcccattgtggaccagtcaccggatacattttcgcacttttggcagtgttcaatttcctgtttttgatattccttagatggatgacccccgacagcattattgacgtggcaattgatgctaccggtccacgcggtgcgtggacgaacaactactctcattcgaagcggggtggagaaaacaacgagatttcggagactcgc

SEQ ID NO: 250764 - DNA, 1452 bp, synthetic construct
  misc_feature 1..1452: note = Description of Artificial Sequence: Synthetic coding sequence
  source 1..1452: mol_type = other DNA
atggcgtgtagagggggcgcaggcaacggtcacagagcttcagcaaccctctcgcgcgtgtcccctggatctctttacacttgtcggacccgcactcataacatttgcatggtgtcggacttcttttacccgaatatggggggcgtcgagtcgcacatttaccaactttcgcaatgtcttatcgagcgcggtcataaagtgataatcgtgacccacgcctacggaaatcggaaagggattagataccttacttcagggcttaaagtgtactaccttcctctgaaggtcatgtacaaccagtctaccgcaaccaccctctttcatagcctgccattgttgagatacatctttgtgagagagcgggtgacgatcatccattctcattcttccttttcagctatggcgcatgatgcgttgttccatgcaaagactatgggcctgcagaccgttttcaccgaccatagcttgtttgggtttgcagatgtgtcctccgtgctcactaataagttgctgacggtgtcgctttgtgataccaaccacattatctgtgtgtcgtacacttcgaaggaaaacaccgtcttgcgcgcggcacttaaccctgaaattgtctcggtcatccctaatgctgtggatcctaccgactttaccccagatcctttccgccgacatgacagcatcactattgtggtggtgtcacggcttgtgtataggaagggcatcgatctgctttcggggataattccagagctgtgccagaaataccccgaccttaacttcattatcggcggagagggacctaaacgcattatcctcgaagaagtgagagaaagataccaactgcatgatcgcgtccgtctccttggcgcacttgagcacaaggacgtgagaaacgtgcttgttcaaggccacatttttctgaatacttcgcttactgaggccttctgcatggcaatagttgaggccgcaagctgcggtctgcaagtggtcagcaccagagtgggtggaatcccagaagttctgccagaaaacctgattatcctgtgtgagccatcggtcaaatccctgtgtgaaggcctggaaaaggctatctttcaacttaagagcgggaccctgcccgcaccagagaatattcataacattgtgaaaaccttctacacctggaggaacgtcgccgaaagaaccgaaaaggtgtacgatcgggtcagcgtcgaggcagtccttccaatggacaaacgtcttgatcgtctcattagccattgcggacctgtgaccggctacattttcgccctcctcgcagtgttcaactttttgttcctgatttttctgagatggatgactccagattccattatcgatgtggcaatcgatgccactgggccccgcggcgcatggaccaacaactactcgcattcgaaacgaggaggtgaaaacaatgaaatctccgaaacgcga

SEQ ID NO: 250765 - DNA, 1452 bp, synthetic construct
  misc_feature 1..1452: note = Description of Artificial Sequence: Synthetic coding sequence
  source 1..1452: mol_type = other DNA
atggcctgccgtggtggtgccggaaacggacatagagcttctgctacacttagtcgggtgagtcctggatccttgtacacatgccgaacacgtactcataacatctgtatggtttctgacttcttctacccgaatatgggtggagttgagtctcacatatatcaactttcgcagtgcctgatcgaacgtggacacaaggtgattatcgtgacacatgcctacggaaatagaaaaggcatacgttatctcacatctggattaaaggtctattatcttccactgaaggtcatgtacaatcagagcactgcaactacgttgttccatagtttgccactccttcgatatatcttcgttagagagagagttactattatacactctcattctagctttagtgccatggcacacgatgcactcttccatgctaagaccatgggattgcaaaccgttttcacagatcatagcttgttcggattcgcggacgttagctccgttctcaccaataagctcttgacagtttccctctgtgacacaaatcacattatctgcgtttcttacacgagcaaagagaacaccgtgcttagggccgctctcaaccccgaaatagttagtgtaattcccaatgccgttgatccaacagattttacgcctgatccgtttcggaggcacgattcaattacaatcgttgttgtcagccgtttggtgtatagaaagggcattgatcttctgtcgggtatcataccagagctttgccagaaatatcctgatctgaacttcattattggaggggagggtccaaagagaattattctcgaagaagttagagagcgttaccagcttcatgatcgagttcgactcctgggagcactcgaacataaggatgttagaaatgtactggttcagggacatatttttttgaataccagtttaacagaagccttctgtatggcaattgttgaagctgcctcatgcggcctccaagtagttagtacacgagttgggggtattcctgaagtccttccagagaacttgattattctgtgcgaaccttcagtgaaatctctttgtgagggtctcgagaaggccattttccagcttaaatctggtaccttaccggctccagaaaacatacataacatagttaaaaccttctacacgtggaggaatgtcgcagaacggaccgagaaggtttacgacagggtctctgttgaagccgtcctacctatggataaacggttggatcgtcttatctcgcactgtggtcccgtgaccggatatatttttgccctcttggcggttttcaatttcttgtttctgatctttcttaggtggatgaccccagattccatcatcgacgtcgctattgatgctactggtccacgaggggcttggaccaataattatagccattccaaaagggggggagaaaataatgaaattagcgagactaga

SEQ ID NO: 250766 - DNA, 1452 bp, synthetic construct
  misc_feature 1..1452: note = Description of Artificial Sequence: Synthetic coding sequence
  source 1..1452: mol_type = other DNA
atggcgtgcagaggaggtgcaggcaacggccatagggcctccgcgaccctgtcaagagtctcgccggggagtctctacacttgccgcactagaacccacaatatctgtatggtcagcgacttcttctacccaaacatgggtggagtggaatcgcatatctaccagctgtcgcagtgcctgatcgaacgcggtcacaaggttatcattgtgacccacgcctacggaaatcggaaggggatcaggtaccttactagcggactgaaagtctactacctgccgctgaaggtcatgtataaccagagcactgccaccactttgttccactctctgccactcctgcggtacatcttcgtgcgggaacgggtcaccatcatccattcgcacagctccttttctgccatggctcacgatgctctgttccacgctaagaccatggggctgcagaccgtctttaccgaccatagcctgttcggattcgcggacgtatcgtcagtgctcaccaataaacttctgaccgtgagcctgtgcgataccaatcacatcatttgtgtgtcgtacacttctaaggaaaacactgtgttgcgcgcagccctcaacccagaaatcgtgtccgtcattcctaatgcagtcgaccctaccgacttcactccggacccgttcaggagacacgattccatcaccatcgttgtcgtgtcgcgccttgtctacagaaagggtatagacctcctttccggcatcatcccagagttgtgccagaagtacccggatcttaacttcattattggcggtgaaggcccgaagcgcatcatcttggaggaggttagagagaggtaccagctgcatgatcgggtgcgcctgttgggagcgctcgaacataaagacgtgcggaacgtgctcgtgcagggccacatcttcctcaatacgtctctgaccgaggctttctgcatggcaatcgtggaagccgcgtcatgcggactccaagtggtgagcacgagagtgggaggaattccggaagtcctgccggaaaacctgatcatcctgtgtgagccgtctgtgaagtcactttgcgagggattggagaaggcgatctttcagctgaagtcaggtaccctgcccgctccggaaaacatccataacatcgttaagaccttctacacctggcggaatgtggcggagaggaccgagaaagtgtacgaccgcgtgtcggtggaggcagtgctgccaatggacaagagactcgacagattgatctcgcactgcggtccagtgaccggatacatcttcgcgctcctggccgtgtttaacttcctgtttctgatcttcctgcgctggatgaccccagattccattatcgatgtggccatcgacgccaccggaccacgcggcgcctggactaataactactcgcactccaagcgtggaggagaaaacaatgaaatctccgaaacccgg

SEQ ID NO: 250767 - DNA, 1452 bp, synthetic construct
  misc_feature 1..1452: note = Description of Artificial Sequence: Synthetic coding sequence
  source 1..1452: mol_type = other DNA
atggcgtgcagaggcggtgctggcaacgggcaccgcgcgagcgctacactatctcgtgtgtcacccgggagcctgtatacttgccgcacccgtactcataacatttgcatggtgtctgactttttttatcctaacatgggaggagtcgagtctcatatctaccagctctcccagtgcttgatcgagcgtggccacaaagttatcatcgtgacacacgcctatgggaaccgaaagggcatccgctacctcacctccgggctgaaggtgtattacttgcctctgaaggtcatgtacaaccagagtaccgctacgactctgttccactctctgcctctgctgcggtacattttcgtgcgtgagcgtgtgacaataatccactctcactcatcattttctgccatggcccacgatgccttgttccatgctaaaactatggggctgcaaactgtgtttaccgaccacagcctgtttgggttcgccgatgtctcttctgttctgactaacaagctgttaactgtgagcctctgcgacactaatcacatcatatgtgtctcttatacctcaaaagaaaacactgttctgagggccgcgcttaaccctgagattgtgtccgtcatccccaacgctgtcgaccctaccgacttcacgccggatccttttcggaggcacgattcaatcaccatagtcgtggtctctcgtctggtgtataggaaagggatcgacctcctcagcggaattatacccgagttgtgtcagaagtatcccgatcttaattttatcattggaggcgaaggtcctaagcgcataatcctggaagaggtgcgtgaaagataccagttacacgatcgggttcggctgctgggcgccctggagcacaaggacgtgcgcaacgttttggttcagggacacatcttccttaacacatcactgactgaggccttctgcatggctatcgtggaagccgcgtcctgcggactccaggtcgtaagcaccagagtgggcggcattcctgaggtgctgcctgagaacctgatcattctgtgcgagcccagtgtgaaaagtctgtgtgaaggactggagaaggccattttccagctcaagtcgggaaccctacccgcccccgagaacatacataacatcgtgaaaaccttttacacctggcggaacgtggccgagcgtactgagaaagtctacgatcgcgtgtcagtggaggctgtcttgcccatggataagcgactggaccgcctgatctcgcactgcggacccgtcacaggatacatcttcgctttattggccgtatttaactttctgttcctgatattcctgagatggatgacacctgactctatcattgatgtggctatcgatgccaccggaccacggggagcctggactaacaattactcccattctaagcggggcggcgagaacaacgaaatttctgagacccgg

SEQ ID NO: 250768 - DNA, 1452 bp, synthetic construct
  misc_feature 1..1452: note = Description of Artificial Sequence: Synthetic coding sequence
  source 1..1452: mol_type = other DNA
atggcctgccgcgggggagctggcaacgggcacagagcatccgctactctgtcacgggtgtcaccgggatccctgtacacttgccgtacccgtactcacaacatctgtatggtgtccgatttcttctatccgaatatgggaggagtcgaatcgcacatatatcagctcagccagtgtttgatcgaacgaggccataaagtgatcatcgtcacccacgcctacggcaaccggaagggaatacgatacctcacttcaggacttaaggtgtactatctgccgctcaaagttatgtacaaccaatccaccgcaacgaccttgttccattcgctcccgctgcttcggtacatattcgtccgggaacgcgtgactatcattcacagccattcgtcgttctcggccatggcgcatgatgcgttgtttcacgccaagacgatgggcctgcaaactgtgttcaccgaccattcgctttttggatttgcggatgtgtcctctgtgctcactaacaagctgctcaccgtgagtctgtgtgacactaatcatatcatctgcgtgagctacacttccaaggagaacaccgtgctccgggccgcgctgaacccagaaatcgtgtccgtcatcccgaacgcggttgacccgacggatttcaccccagacccattccggcggcatgacagcattaccatcgtggtggtatcgcggcttgtgtaccgcaagggaatagatctgctgtctggcattatcccggaactttgccagaagtaccccgatctgaatttcatcatcgggggagagggacctaaaagaatcatcctggaggaggtgcgggagaggtaccagcttcacgatcgggtccggcttctcggcgctctggagcacaaagatgtgcgcaacgttctggtgcagggacacatctttctcaatacctcactcactgaggccttctgtatggcaatcgtcgaagctgcaagctgcggtttgcaggtggtgagcacccgcgtgggagggattccagaggtcctgccggagaacctgattatcctgtgcgagccttctgtgaagtcgctctgcgaaggccttgagaaggcgatttttcaacttaagtcaggcaccctgcctgcccccgagaacatccacaatatcgtgaaaacgttctacacctggcgcaacgtcgctgaaaggacggaaaaagtctacgacagagtgtcagtggaagcggtcctgccaatggacaagcggctggacagattgatttcccactgcggacccgtgacggggtacattttcgcgctgctggccgtgtttaacttcctgtttctcatcttcctgaggtggatgacgccggactccatcatcgacgtggcaatcgacgccaccggccctagaggagcctggactaataactactcacactcgaagcggggtggagagaataacgaaatctcagaaacccgg

SEQ ID NO: 250769 - DNA, 1452 bp, synthetic construct
  misc_feature 1..1452: note = Description of Artificial Sequence: Synthetic coding sequence
  source 1..1452: mol_type = other DNA
atggcgtgtagagggggggccggcaatggccaccgggctagtgccacgctgtctcgtgtgtcccccggcagtctctacacatgccgcacgaggacgcataacatctgcatggtgtcggactttttttaccctaatatgggaggagttgagagccatatttaccagctttctcagtgtttgatcgaacgcgggcacaaggttatcatagtgacgcacgcgtacggcaatcgcaagggtattcgctatctgacgagtggtctcaaggtatactacttgccgttaaaggtgatgtacaatcagtccacagccaccaccctgttccattccttgccgttgctgaggtacatctttgtaagggagagggtgactattatccactcacattcctccttttcagccatggcacatgacgcattgtttcatgctaagaccatgggtctgcagacagtctttactgatcattctctgtttggcttcgcggacgtcagttccgttctgactaacaagctgctgacagttagcctgtgcgataccaatcacattatctgcgtgtcttatacttctaaggaaaatacagtactacgagccgccctaaatcctgaaatcgtttctgtgattcctaatgctgtcgacccaactgatttcacccccgatcccttcagaaggcacgattctattaccatagtcgttgtctcccggcttgtctacagaaagggcattgacctgctgagcggtattattcctgagctgtgtcaaaagtacccagacctgaactttattatcggcggcgagggaccaaagcggatcatcttagaggaagtgcgtgagaggtaccagcttcacgaccgggtgagactgctgggcgccttggagcataaggacgtccgtaatgtgcttgttcaagggcacatcttcctgaacacctcattaacggaggccttctgtatggctatcgttgaggccgcatcctgtggcttgcaggtggtctcaaccagggtggggggtatccccgaggttctccccgagaatctgattatactgtgtgagccgtccgtcaaatctctgtgcgaaggactggagaaggctatttttcaactgaagagcggaaccttaccagcacccgaaaatatccacaatatagtgaaaacattctacacctggcggaacgtggctgagaggaccgagaaggtgtacgaccgcgtctcggtcgaggccgttttgccgatggacaagagactggatcgcctgatcagccactgcggacctgtgacagggtatattttcgctctcctggccgtgttcaattttctttttctgatcttcctgcggtggatgacccccgacagtatcatagatgtggctattgacgccactggcccccgaggggcctggacaaacaactatagtcatagtaaaagaggcggggagaataacgaaatcagcgaaacacgc

SEQ ID NO: 250770 - DNA, 1452 bp, synthetic construct
  misc_feature 1..1452: note = Description of Artificial Sequence: Synthetic coding sequence
  source 1..1452: mol_type = other DNA
atggcgtgccgcggcggcgccggtaacggtcacagagctagcgccactctgtcacgggtgtccccgggctccctgtacacttgccggactagaacccacaacatctgtatggtgtcggactttttctaccctaatatggggggtgtcgagtcccacatataccagctgagccaatgcctcatcgaaagagggcacaaagtcatcattgtgactcatgcctatggcaataggaagggaatccggtacttgacttcgggactcaaggtgtactaccttcctctcaaagtgatgtacaaccagtccaccgcgactaccctgtttcatagcctgccgctcctccgctacatcttcgtgcgcgaacgtgttactatcatccactcgcactcgagcttctccgccatggcgcacgacgcactgtttcacgccaagactatggggctgcagactgtgtttacggaccacagcctgttcggcttcgccgatgtctcgtctgtcctgaccaataagctgctgaccgtgtcactgtgtgacaccaaccacatcatctgcgtctcctacacttccaaggaaaacaccgtgctgcgcgccgctctcaatccagagatcgtgtctgtgatcccaaacgccgtggatccaacggatttcaccccggacccgttcagacgtcacgactccatcacgattgtggtagtctcccggctcgtgtatcggaaaggaatcgacctgcttagcggaatcatcccggagctgtgccagaaatacccggatctcaatttcatcatcggcggcgagggaccaaaacgcatcattctggaggaggtgcgcgaacggtaccaacttcatgaccgggtgcggctgcttggagctctcgaacacaaggacgtcagaaatgtcctcgtccaaggacacatcttccttaacacttcgctcaccgaggctttttgcatggccatcgtggaagcagcgagctgtggcctccaggtggtgtcaaccagagtgggcggaatcccggaggtgctgcccgagaatctgattatcctctgcgaaccgtccgtgaagtccctctgcgaggggctcgagaaggccatctttcagttgaagagcggcaccctcccggccccagagaatatacacaatatcgtgaaaaccttttacacctggagaaatgtggcggagcgcaccgaaaaagtgtacgaccgcgtgtccgtggaggcagttttgcccatggacaagagactggaccgattgatctcacactgcggaccagtgactggatacatcttcgccctcctggctgtgtttaacttccttttcctcatctttctgcgctggatgacccccgactcgatcatcgatgtggctatcgatgcgactggccccaggggagcctggaccaacaattacagccactctaaacggggaggagagaataacgagatttcggaaaccaga

SEQ ID NO: 250771 - DNA, 1452 bp, synthetic construct
  misc_feature 1..1452: note = Description of Artificial Sequence: Synthetic coding sequence
  source 1..1452: mol_type = other DNA
atggcctgtaggggcggcgctggcaacggtcatcgggcgtcagcgacattgtcccgcgtctcaccaggatccctgtatacttgcaggacccggacccataacatctgcatggtgtcagacttcttctacccaaacatgggaggtgtcgagtctcacatctaccagctcagtcagtgcctgatcgagcgaggacataaggttatcattgtgacacatgcatatggcaaccggaaaggaatccgctacctgaccagtggtctgaaagtgtactacttgcccctgaaggttatgtacaatcagtcaacagctactacgctgttccacagtctgccgttactacggtatattttcgtacgagagagggtgacaatcattcactctcactcaagcttcagtgctatggctcatgacgcacttttccatgcgaagacgatgggactgcaaacggtctttactgatcactccctattcggatttgcagatgtatcatcagttctcaccaataaattgctgaccgttagcttatgcgacaccaaccacatcatctgtgtatcttacactagcaaagaaaataccgtgctccgggcagcacttaacccggagatcgtatctgtaatcccgaacgctgtcgacccaactgatttcacaccagaccctttcaggaggcatgattcaatcaccatcgtcgtcgtgtccagactcgtgtatcggaaaggcatagacttgctgtctggcattatccccgagctgtgtcagaagtaccctgatctgaactttataatcgggggcgaaggtcctaaacgcataatcctggaggaagtgcgggagcgctatcagctgcacgacagagtgcggctgctcggagcactcgaacacaaggatgtccggaatgtccttgtccaggggcacatctttctgaatacttctctaaccgaggccttctgtatggctatcgtggaagccgccagctgcggccttcaggttgtatcgactcgagtgggtggcattccggaggttctgcccgaaaatttgattatcctctgtgagccctcagtgaaatctctctgtgagggactggagaaagccattttccaactgaaatccggcacactcccagcaccagagaatatacataacattgtcaagaccttctacacatggcggaacgtggcggaacgcacagagaaggtgtacgacagggtgagtgtggaggccgttctccccatggacaagcggctggatcgcctcatcagccactgtgggccggtgacgggttatatctttgccctccttgcagtgttcaacttcttgttcctgatctttctcagatggatgacaccagactccattattgatgtggcaattgatgccacagggccacgaggcgcttggaccaacaattattcgcattccaagcgaggcggtgagaacaacgagatatctgaaacccgc

SEQ ID NO: 250772 - DNA, 1452 bp, synthetic construct
  misc_feature 1..1452: note = Description of Artificial Sequence: Synthetic coding sequence
  source 1..1452: mol_type = other DNA
atggcatgtagaggaggagcaggaaatggacatagagctagtgctactctttctagggtatctccaggaagtttatatacatgtcgaactagaactcataatatttgtatggtttcagacttcttctatcctaatatgggaggagttgaaagtcatatttatcaattgtcccagtgtctcattgaaagaggacataaggtaattattgttactcatgcatatggtaatagaaagggtattagatatttaacatcaggacttaaagtttattatttaccattaaaagttatgtataatcaatcaacagcaacaactttattccattcacttccactattaagatatatctttgttagagaaagagttacgataattcattctcatagtagttttagtgctatggcacatgatgctctttttcatgctaagactatgggattacaaactgtctttacagatcattcattatttggttttgctgatgtttcttccgttttaactaataagttattaacagttagtttatgcgacactaatcatataatttgtgtttcttacacttctaaagaaaacacagtacttagggcagcacttaatccagaaattgtatctgttattcctaatgcagtagatccaacagattttactccagatccatttaggagacacgatagtattacaattgttgttgtttcacgtttagtttatcgtaaaggtattgatttattaagtggtattataccagagctttgtcaaaaataccctgatttaaattttattattggaggagaaggacctaaacgaattatattagaagaagtaagagaacgatatcaattacatgatagagttaggcttcttggtgctcttgaacataaggatgtacgtaatgttttagtgcagggtcatattttcttaaatacatctttaacagaagctttttgcatggctatcgtggaagctgcaagttgtggtttacaagttgtatcaactagagttggtggtattcctgaagtactccctgaaaacctcattattttatgtgaaccaagtgttaaatcattgtgtgaaggacttgaaaaagcaatcttccaattaaaatcagggactttaccagcacctgaaaatattcataacatcgttaaaactttctatacatggcgaaatgttgctgaaagaactgaaaaagtttatgatagggtttctgttgaagcagttttaccaatggataaaagattagatcgattaatttcacattgtggtccagttacaggatacatttttgcattattggcagtttttaattttttatttttgatttttttaagatggatgactcctgattcaattatcgatgtagcaattgacgcaactggaccacgaggagcatggactaataattattctcattctaaaagaggaggagaaaataatgaaatttccgaaacaaga

SEQ ID NO: 250773 - DNA, 1452 bp, synthetic construct
  misc_feature 1..1452: note = Description of Artificial Sequence: Synthetic coding sequence
  source 1..1452: mol_type = other DNA
atggcctgccgcggcggcgccggcaacggacacagagcctctgccacactgagccgagtgagcccgggaagcctctacacttgtcgcactcgcacccacaacatctgcatggtgtccgattttttctaccccaacatggggggtgtcgaaagccatatataccagctgagtcagtgcctgatcgaacgtggccataaggtaatcatagtcacccatgcctacggaaaccgcaaaggcattaggtacctgacgtccggtttaaaggtgtactatctgcccctgaaggtcatgtataatcagagcactgctaccacgctctttcacagtctaccattgctgcgttacatctttgtgcgagaaagggtcaccataattcattcgcactccagtttctccgctatggcccacgatgcgctatttcacgcaaagactatgggcttgcagacagtgtttaccgatcattccctgttcggattcgccgacgtgagcagcgtgctgacaaacaagctgctgactgtttccctatgcgatacgaatcacataatttgtgtgagctacacgtcaaaagagaatacggtactccgggccgccctgaatccagaaatcgtctcggttatacccaacgctgttgaccctaccgatttcacccccgaccccttccgccgccatgactccataacgattgtggtggtaagtcgcctggtgtatcggaagggtattgacctgctgagcgggatcatccctgaactgtgtcagaagtaccccgatttgaatttcatcatcggcggcgaaggtccgaagagaattattttggaagaggtacgagagcgatatcagctacacgaccgcgtgcgactgctgggtgcgctcgagcacaaggacgtccgcaacgttctcgtgcaggggcatatctttttgaatacctcacttacggaggcattttgcatggctatcgtggaggcggcctcctgtggtctgcaggtggtgagcaccagagtcggaggtatccctgaggtgcttccggagaacctcattatcttgtgcgaaccgagcgtcaagtcactgtgcgaaggactcgagaaggcaatattccaactcaagagcggaaccctcccagcgcccgagaatatacacaatatcgtgaaaacattctatacgtggcgtaatgtggcggaacgcaccgaaaaggtttacgatcgcgtcagcgtcgaggccgtgctcccgatggacaagcgccttgaccgtctgatatcacactgtgggccagtgacgggctatattttcgccctcttagcggtcttcaactttctgtttctgatttttttgcgctggatgaccccggacagcatcatcgatgttgcgatagacgctacaggcccgcgtggggcctggaccaataattactcacactctaagcgcggcggtgagaacaacgagatttccgagacgaga

SEQ ID NO: 250774 - DNA, 1452 bp, synthetic construct
  misc_feature 1..1452: note = Description of Artificial Sequence: Synthetic coding sequence
  source 1..1452: mol_type = other DNA
atggcatgtcgcggcggcgccggcaacggacacagagcctcggcaactctcagccgagtctcacctggatccctgtacacttgcagaactcgaactcacaacatttgcatggtgtccgatttcttttatcctaatatgggaggggttgaatcccatatctaccaactgtcgcaatgcctgatcgaacgaggacacaaagtgatcatcgttacccacgcgtacggaaaccgaaaaggcatccggtacttgaccagtggactgaaggtgtactaccttccactcaaggtgatgtacaatcagagcactgctacgactctttttcactcgctccccctcctgcggtacatcttcgtcagggagcgcgtgaccataatccattcccatagttccttctctgccatggcacatgatgcactcttccacgctaagaccatgggacttcagactgttttcactgaccactcgctctttggctttgccgatgtgtccagcgtcctgacgaacaagctgctgaccgtctcactttgcgataccaatcacataatctgcgtctcgtacacttcaaaggagaacactgtactgcgcgctgcgctcaacccagaaatcgtgtcggtcatcccgaatgccgtcgacccgaccgatttcaccccggacccgttcaggcgacatgactctatcaccatcgtcgttgtgtcgagactggtgtaccgcaagggaatcgacctcctgtccggaatcattcctgaactgtgccagaagtacccggatttgaatttcatcataggaggggaaggtcctaagagaattatccttgaagaagtccgggaacgctaccagttgcatgatcgggtgcgcctcctgggagccctggagcataaggacgtgcggaacgtgctggtgcagggccacatcttcctgaatacttcactcacggaggctttctgcatggcgatcgtggaagccgcgtcatgtggtctgcaggtcgtctcgactagggtgggaggtatccccgaagtgctcccagagaatctcatcatcctgtgcgaaccgtcagtgaaatccctgtgtgaggggctggaaaaggccattttccaactcaagagcgggactctcccggcgcccgagaacatccacaacatcgtgaaaaccttctatacctggaggaatgtggctgaacgcactgaaaaagtgtacgaccgcgtaagcgtggaggcggttcttcctatggacaagagacttgatcggctgatctcccactgcggaccggtgaccggatacatttttgccctcctggccgtgttcaactttttgttcctgatcttcctgcgttggatgaccccagacagcatcatcgacgtggcgattgacgctactggcccgcggggagcctggacgaataactacagtcatagcaaacgcggaggcgaaaacaacgagatctcagagactaga

SEQ ID NO: 250775 - DNA, 1452 bp, synthetic construct
  misc_feature 1..1452: note = Description of Artificial Sequence: Synthetic coding sequence
  source 1..1452: mol_type = other DNA
atggcttgtagaggaggcgccgggaatgggcaccgggcctctgccaccttgagtcgcgtgagtcctggttccctgtatacttgcagaacccggacccataacatatgtatggtgtccgactttttctatccaaacatgggaggagtggaatctcacatctaccaactttcgcaatgcctgattgagcggggacacaaagtgattatagttacccacgcgtacggaaatcgtaaaggaatccgctacctgacatctggccttaaggtatattacctaccccttaaggtcatgtataaccagtccactgcaacaacgttatttcatagtctccccctgcttcgctacatttttgtgcgcgagcgtgttaccattatccactctcactcctcttttagcgccatggcccacgacgcactgtttcacgctaaaacgatggggctccaaactgtttttacggaccatagcctttttggattcgctgatgtgtcgtccgtgctgacaaataagttgttgacagtcagcttgtgtgacacgaaccacataatctgtgtgagctacactagtaaggagaacaccgtcttacgcgccgccctgaatcctgaaatcgtctccgtcatccctaacgccgttgatcctacagactttacgcccgatccgttccggcgacatgactccattacaatcgtcgtcgtgagccggctggtctatcgaaaaggtattgacctactgtcaggcattatcccagaactgtgtcagaaatatccagatctcaactttatcatcggtggtgaaggccctaagaggatcatactcgaagaggttagagagaggtatcagctccatgaccgagtgagactcctaggcgcactcgaacacaaggatgtgcggaacgtgctggtgcagggccacatcttcttgaacaccagtctaacagaggctttttgcatggccatcgtcgaggcagcatcgtgcgggttgcaagttgtgtctactagggtgggcggaatccccgaggtgctccccgaaaacctaatcatcctgtgtgaaccgagtgtaaaatctttgtgcgaggggcttgagaaggccatcttccaactgaagagtggtaccctgcccgctcctgagaacattcacaacattgtgaagactttctacacttggagaaatgtagctgaacgaactgaaaaggtgtacgaccgcgtatcggtggaggccgtgctgcccatggataagaggctagataggctcatatcacattgtggacccgttacgggatacatttttgcactcttggccgtgtttaactttctctttctgatctttctgcggtggatgactcccgatagtattatagatgttgctattgatgctactggccctagaggggcctggaccaacaattacagccattcaaagcggggcggcgaaaataatgagatttccgaaaccaga

SEQ ID NO: 250776 - DNA, 1452 bp, synthetic construct
  misc_feature 1..1452: note = Description of Artificial Sequence: Synthetic coding sequence
  source 1..1452: mol_type = other DNA
atggcttgcagaggtggagctggaaatggccacagggcctctgcaacccttagcagagtgtcccctggatccctttacacttgtagaactcgcactcacaacatttgcatggtgtcggactttttctaccccaacatgggcggtgtcgaatcccatatctatcaactttcacaatgtcttattgaacgcggtcataaagtcattattgtgactcatgcatacgggaacagaaagggaattagataccttacctcaggactcaaagtgtactacctccctctgaaggtcatgtacaatcagtccaccgcaaccacgctttttcattcgctcccacttcttaggtacatctttgtccgcgagagggtcacgatcatccactcccattccagcttctccgcaatggcgcacgacgccctctttcacgcaaagacgatgggacttcagacggtgttcaccgaccactccctcttcggttttgccgatgtgtcgtccgtgctgactaacaaacttcttaccgtgtcgctgtgcgatactaaccacataatctgtgtgtcatacacctcaaaggaaaacactgtgctgcgggcggcactgaaccccgaaattgtctcggtcatcccaaatgcagtggaccctactgatttcactccagatccattccgtcgacatgattcgatcactatcgtcgtggtttcgagactggtgtaccgcaaggggatcgatcttctgtcgggaatcattcctgagctgtgccaaaagtacccagatctcaactttatcattggcggcgaaggtccaaagagaatcatactcgaagaagtgagagaacggtaccaattgcacgatagagtgagacttctgggggcactcgaacataaggacgtccgtaacgtcttggtgcaaggacacatctttctcaacacctcccttactgaagccttctgtatggcaattgtcgaggcggcgtcgtgcggtctgcaggtggtgtccactagagtgggcgggattcctgaagtcctgcctgagaacctgatcatcctctgcgagccaagcgtcaagtcgctttgcgaaggtcttgagaaagcaatattccaactgaaatcaggaacccttcccgcccccgagaatatacacaacattgtcaagaccttttacacttggaggaatgtcgccgaaagaactgaaaaggtgtacgatagagtgtcggtggaagcagtgcttcctatggataaaagattggatcgacttatatcccattgtggtccagtgaccggatacatctttgcccttcttgcggtgttcaatttcctgttcttgattttccttagatggatgacgcctgattcgattatcgatgtggcaatcgatgcaactggaccgaggggagcctggactaacaattacagccattcaaagcgtggaggagaaaacaacgaaatcagcgagactaga

SEQ ID NO: 250777 - DNA, 1452 bp, synthetic construct
  misc_feature 1..1452: note = Description of Artificial Sequence: Synthetic coding sequence
  source 1..1452: mol_type = other DNA
atggcctgccgggggggcgcaggaaacggacacagagcttccgctaccctttccagggtaagccctggctcactttacacttgtcgcacgcggacccacaatatctgcatggtctccgatttcttttacccaaacatggggggagtggagtcacacatctaccaactgagccagtgcctgattgaaaggggccacaaggtgatcatagtcacacatgcctacgggaatcgcaaaggaatacgctatctcaccagcggccttaaggtgtattatctgccactgaaagtgatgtataaccaatccacagctaccacactctttcactccttgccattgctcaggtacatcttcgttagagaaagagttacgatcatccacagtcactctagcttcagcgcgatggcgcatgatgccttgttccacgcgaagacgatgggtctgcaaacagtctttaccgaccacagcctgttcggcttcgcggacgtttcctccgtgttgacaaacaagttgctgactgtgtccctgtgcgacactaaccatatcatttgtgtcagctatacgtccaaggaaaataccgtgctcagggccgccctcaatccagaaattgtgtctgttattcccaacgctgtcgatcccaccgactttacacctgatccttttagacggcacgactcaattacaattgtggttgtgtctcgcttggtctatcggaaaggaatcgacttgctgtcaggcataatcccagagctgtgccagaagtatccggatttgaactttatcatcggcggggagggaccgaagcgaatcatccttgaagaggtgcgagagcggtatcagctccatgacagggtgaggctgctgggggccctcgaacacaaggacgtgagaaacgttctcgtgcagggtcatatcttcctgaataccagcctgactgaagcattctgtatggctattgtggaggcagcctcatgtggccttcaagtcgtatctactcgggttgggggaatacccgaagtgttgcccgagaacctgatcatactctgtgagccttccgttaaaagtctgtgtgagggacttgaaaaagccatctttcagctgaagagcggtactttgcctgcgcccgagaacatacacaacatagtcaagacgttttatacctggaggaatgtcgcggaaaggactgaaaaggtttatgatagagtgtccgtggaggcagtgctgcctatggataagagactggacaggcttatttctcactgtgggcccgtgactggctatattttcgcgctgctggcagtctttaattttctcttcctgatctttctgcgctggatgacaccggactccatcatcgatgtggcaatcgacgcaaccggccctcggggcgcttggactaacaattacagccactcaaagcgcggtggggagaacaatgagatatcagaaacacgc

SEQ ID NO: 250778 - DNA, 1452 bp, synthetic construct
  misc_feature 1..1452: note = Description of Artificial Sequence: Synthetic coding sequence
  source 1..1452: mol_type = other DNA
atggcgtgtcgtggtggtgcgggtaatggtcatcgtgcgtcggcgacgctatcgcgtgtttcgccgggttcgttatatacgtgtcgaacgcgtacgcataatatatgtatggtatcggattttttttatccgaatatgggtggtgttgaatcgcatatatatcaactatcgcaatgtttaatagaacgaggtcataaagtaataatagtaacgcatgcgtatggtaatcgaaaaggtatacgttatttaacgtcgggtttaaaagtatattatctaccgttaaaagtaatgtataatcaatcgacggcgacgacgctatttcattcgttaccgctattacgatatatatttgtacgagaacgtgtaacgataatacattcgcattcgtcgttttcggcgatggcgcatgatgcgctatttcatgcgaaaacgatgggtctacaaacggtttttacggatcattcgttatttggttttgcggatgtatcgtcggtactaacgaataaattattaacggtttcgctatgtgatacgaatcatataatatgtgtatcgtatacgtcgaaagaaaatacggtactacgtgcggcgttaaatccggaaatagtttcggtaataccgaatgcggttgatccgacggattttacgccggatccgtttcgtcgacatgattcgataacgatagtagtagtatcgcgactagtttatcgtaaaggtatagatttactatcgggtataataccggaattatgtcaaaaatatccggatctaaattttataataggtggtgaaggtccgaaacgtataatactagaagaagttcgtgaacgatatcaattacatgatcgtgtacgactactaggtgcgttagaacataaagatgttcgtaatgttttagttcaaggtcatatatttctaaatacgtcgctaacggaagcgttttgtatggcgatagttgaagcggcgtcgtgtggtttacaagtagtatcgacgcgagtaggtggtataccggaagtattaccggaaaatctaataatattatgtgaaccgtcggttaaatcgttatgtgaaggtttagaaaaagcgatatttcaattaaaatcgggtacgttaccggcgccggaaaatatacataatatagttaaaacgttttatacgtggcgaaatgttgcggaacgaacggaaaaagtatatgatcgtgtttcggtagaagcggtattaccgatggataaacgattagatcgattaatatcgcattgtggtccggtaacgggttatatatttgcgttattagcggtatttaattttctatttttaatatttctacgttggatgacgccggattcgataatagatgtagcgatagatgcgacgggtccgcgtggtgcgtggacgaataattattcgcattcgaaacgaggtggtgaaaataatgaaatatcggaaacgcga

SEQ ID NO: 250779 - DNA, 1452 bp, synthetic construct
  misc_feature 1..1452: note = Description of Artificial Sequence: Synthetic coding sequence
  source 1..1452: mol_type = other DNA
atggcgtgcaggggtggagccggaaacggacacagagccagcgcaactttgtcaagggtgagcccggggagcttgtacacttgtcgaactcggacccataacatttgtatggtatccgacttcttctacccgaacatggggggagtcgaatcccacatttaccagctctcgcaatgcctgattgagagagggcataaggtgatcatcgtgacccatgcctacggaaaccgcaagggaataaggtatctgacttcgggactcaaggtgtactaccttccgcttaaggtgatgtacaatcaatccaccgcaacgactttgttccactcgctgccactgctgcgctacatctttgtgcgcgaaagggtcaccatcatccactcgcacagttctttttcggccatggcacacgacgccctgtttcacgcaaagactatgggactgcagactgtgtttactgatcattcgctcttcggtttcgcagatgtctcatcggttctcaccaacaagctgctgaccgtgagcctgtgcgacaccaatcacatcatctgtgtgtcatacacgtcaaaagaaaacaccgtgctgcgggcggccctgaatccggaaatcgtgtcggtgatcccgaatgcagtggatccgactgatttcacgccagacccatttcggagacatgactccatcaccattgtggtcgtctcacgccttgtgtaccggaagggaatcgacttgctctccggtatcattccggagctgtgtcaaaagtatccagaccttaacttcatcatcggaggagagggaccgaagcggatcatcttggaagaagtcagagagcgctatcaactccatgaccgggtgcgcctcctgggcgcccttgagcacaaggacgtgaggaacgtgctggtgcagggacatatcttcctcaacacgtcgttgaccgaagccttctgcatggccatcgtggaggctgcgtcctgcggccttcaggtggtcagtactagagttggagggatcccagaggttctgcccgagaatcttatcattctgtgcgaaccatctgtgaagtccctctgcgaaggactcgagaaggccattttccaactgaagagcggtaccctgccggcgccagaaaacatccacaatatcgtgaaaaccttctacacgtggagaaatgttgccgagcgaactgaaaaggtgtacgatcgggtcagcgtcgaggcggtgctgcccatggataaacggctggaccggcttatttcacattgtggtccggtgaccggatacatttttgcactcctggcggtgtttaacttcctgtttctcatcttcctgcgctggatgaccccggactcaatcattgatgtggctatcgacgcgacgggaccgcggggagcctggactaataactactcacacagcaaaagaggcggagagaacaatgagatctcagaaacgcgc

SEQ ID NO: 250780 - DNA, 1452 bp, synthetic construct
  misc_feature 1..1452: note = Description of Artificial Sequence: Synthetic coding sequence
  source 1..1452: mol_type = other DNA
atggcatgtcgtgggggtgcagggaacggccacagggcttctgctaccttatctagagtgagtccagggtcactgtacacatgccggacgcgaacccacaacatttgcatggtctcagacttcttctatccaaatatgggcggcgtggaatcgcacatctaccagttgtcgcaatgcctgatcgagcgtggacataaagttatcatcgtcacccatgcttatggaaatagaaagggtatccgttacctaactagtggcttgaaagtgtactatttacccctgaaggtgatgtataaccagtccacagccacgactctttttcacagcctgccccttctgcggtatatcttcgtgagggagcgggttactattatccatagccatagtagtttctctgccatggcgcacgacgcactcttccacgccaaaacgatgggtttacagactgttttcaccgaccattctctgtttggattcgcagatgtttccagcgtcctgaccaataagctgcttacagtctctctttgtgatactaaccatattatctgtgtgagctacacctccaaagagaatacagtgctgcgcgctgcacttaatccagaaatagtctcggtgatccctaacgctgttgacccaaccgattttacccctgaccctttccgccgccacgattcaatcactatagtcgtggtaagtagactcgtatatagaaagggtattgacctgctcagcggtatcataccagaactgtgtcagaaatatccagatttgaacttcatcatcgggggggaagggccgaagagaataattctggaggaagtgagagaacgatatcaacttcacgacagggtacgtctgctcggtgccctggagcacaaggatgtgaggaacgtactagtgcagggccacatcttccttaacacctccctaactgaggccttctgtatggctatcgtggaagccgcctcttgcggattacaggtcgtctctacaagagtgggggggattcctgaggtcttacctgagaatttgatcatcctgtgtgagccaagcgtcaagtctttatgcgaaggtctcgagaaggctatcttccagctgaaaagtggaacactacctgccccagaaaacatccataatatcgtaaaaactttctacacctggcgcaatgtggccgagaggaccgagaaagtttatgacagagtgagtgtagaggctgtgctacccatggacaagagattggaccggctaatcagccattgtggaccagtaaccggatacatcttcgctctgctcgcagtgtttaatttccttttcctgatttttcttaggtggatgacccctgattccataattgacgtcgcgatagacgccaccgggccgcgcggcgcatggaccaacaactattcacacagcaaacgtggcggcgaaaataatgagatcagtgaaaccagg

SEQ ID NO: 250781 - DNA, 1452 bp, synthetic construct
  misc_feature 1..1452: note = Description of Artificial Sequence: Synthetic coding sequence
  source 1..1452: mol_type = other DNA
atggcgtgtagagggggtgccggtaatggacacagggcatcagccactctgtcacgggtgtcccctggttcgctgtacacctgtagaacccggacgcacaatatctgtatggtgtcggatttcttctacccaaacatggggggtgtcgagtctcatatctaccaactcagccaatgtctgatcgagagaggacacaaggtgattatcgtgactcatgcttacggaaaccggaagggaatacgttacctgactagcggtctgaaggtgtactacctgcccctgaaggtcatgtacaatcaatcgaccgcaactaccctgtttcactcgctgccactgttgaggtacatcttcgtgcgtgaaagggttaccattatacattcacattcctcattttcagctatggcacatgatgcactctttcatgcaaagactatgggcctgcaaaccgttttcactgaccattccctttttggatttgccgacgtttcgagcgtgctgactaataagctcctcaccgttagcctctgtgacaccaaccacatcatttgtgtctcgtacacttctaaagaaaataccgtgctccgtgcggctttgaaccctgaaattgtgtccgtgattccgaatgctgtggaccccaccgacttcaccccagatccttttcggcgccatgattctatcaccatagtagtggtgtccagacttgtctacagaaagggtattgacttgctgagcggaatcatccctgaactttgtcagaagtaccctgatctgaactttatcattggaggagagggaccaaagcggattattcttgaagaagtgcgcgagaggtaccaacttcatgacagggtgaggttgcttggcgcccttgagcataaggatgtgcgcaacgtccttgtgcagggccacatctttctcaacaccagcctgaccgaagcattttgtatggcaattgtcgaggctgcatcgtgcggactgcaggtcgtgtcgacgagagtggggggtatccccgaagtgcttccagagaaccttatcatcctttgtgaaccctcagtcaagtccctttgtgaaggtcttgaaaaagcaatcttccagcttaagtccggaacgcttcctgccccggagaacattcataacattgtcaagacgttttacacctggagaaatgtggcagaaaggactgaaaaggtgtacgatcgggtcagcgtcgaagctgtgctgcccatggataagagactcgacagactgattagccactgtggcccagtgaccggatatatctttgccctccttgccgtgtttaactttcttttcctgatattccttcggtggatgaccccagattctattatcgacgtggccatcgatgcaactgggccacgcggagcatggacgaataactattcccacagcaagaggggtggggagaataacgaaatctccgaaaccaga

SEQ ID NO: 250782 - DNA, 1452 bp, synthetic construct
  misc_feature 1..1452: note = Description of Artificial Sequence: Synthetic coding sequence
  source 1..1452: mol_type = other DNA
atggcctgccgaggaggcgctggcaatggccatcgggcctccgctactctctctcgggtcagtcccggcagcctttacacatgccgcacccggacccataacatctgtatggtcagcgactttttctaccccaacatggggggagtcgagagccacatctaccagctgtcccagtgtcttatcgaaaggggccacaaagtgataattgtgacccatgcatatggaaatcggaaagggatccgctacctgacctccgggctgaaagtttactatctgccactgaaagtcatgtacaatcagtctacagctacaaccctgtttcactccctccctctcttgcgctatatcttcgtgcgcgaacgtgtcacaatcatacattcccactccagtttttcagccatggcacacgatgcccttttccacgccaaaactatgggactgcagacagtgtttacagaccacagcctcttcggattcgccgacgtgagcagtgtgctgaccaacaagctcctcacggtttcactctgtgatacaaaccatataatttgcgtatcctacactagcaaagaaaatacagtgctgcgtgccgccctcaaccctgagatcgtttctgttatcccaaatgcagtggaccccacggactttaccccggatcctttccgccgccacgattccattaccattgtggtggtatctcgcctggtctatagaaagggaatcgacctgctctccggaatcattcccgagctatgccagaagtatcctgaccttaacttcatcattggtggagaaggaccaaagcgcattattctagaagaagtccgagagaggtatcagctgcacgatcgagttcgactcctgggagctttggagcacaaggacgttaggaacgtgttggtgcaaggccacattttcctgaatacctctctgacggaggctttctgcatggcgattgttgaagccgcctcatgcggcctccaagtagtcagcaccagggtgggaggcataccagaagtgcttccggaaaatctgattatcctttgcgaaccgtccgtgaagtcgctatgtgagggactagaaaaagcaattttccagctgaagagcggaactctgcctgcccctgagaacattcacaacatcgtcaaaaccttctacacctggcgcaacgtggccgaacgcactgagaaagtgtatgacagggtatctgtggaagccgtgctgccaatggataaacggctcgataggcttatcagccattgcgggccagtgacaggatacatcttcgctcttctggccgtatttaactttctctttcttattttcctccggtggatgacacctgactctataattgacgtcgcgattgatgcaaccggaccaaggggcgcctggactaacaactactcccacagtaaaaggggcggggagaataacgagatcagcgagactcgt

SEQ ID NO: 250783 - DNA, 1452 bp, synthetic construct
  misc_feature 1..1452: note = Description of Artificial Sequence: Synthetic coding sequence
  source 1..1452: mol_type = other DNA
atggcctgtagagggggagcgggaaacggtcatcgcgcatccgcaactctttccagggtgtcccctggctcgctgtacacctgtaggactcgcactcataacatatgtatggtcagcgatttcttctacccaaacatgggtggtgtggaatcgcacatttaccaactttcacaatgtttgattgaacggggtcataaagtgattattgtgacccacgcatacggcaaccgcaagggtatccgttacctcacctccggtcttaaggtgtactaccttccactgaaggtgatgtataatcaatctaccgcaacgacccttttccattccctgcctctcttgagatacatctttgtcagagaaagagtgacgattattcactcccacagctccttttccgcaatggctcacgacgcactcttccacgctaagaccatggggcttcaaactgtgttcactgaccactcgctgtttggctttgcagatgtgtcaagcgtgctgaccaacaagctccttactgtgtcactgtgcgataccaatcacattatctgcgtgtcgtatacttcaaaggagaatactgtgcttcgagcggcgctgaatccagagatcgtctcagtgattccgaatgccgtggatcctaccgatttcactcccgaccctttccgcaggcatgattcgattaccatcgtggtcgtgtcgagacttgtgtacagaaagggtatcgatcttctctcggggataattcccgagttgtgccagaagtacccagatctgaatttcataatcggaggcgaaggccccaagagaattatcctggaggaagtgcgggagcgctaccaactccatgatagagtccgactgcttggagcgttggagcacaaggatgtgagaaacgtgcttgtgcagggacacatttttctgaacacgtcactgaccgaagccttctgcatggcaattgtcgaagcagcatcatgtggacttcaagttgtgagcacccgtgtcggaggtatccctgaagtcctgcctgaaaacttgatcattttgtgtgagccttccgttaaatcgctctgtgaaggactggagaaggcaatctttcaacttaaatccggaactctgcctgcccccgaaaacatccataacattgtcaaaaccttttacacctggagaaacgtcgccgaacgcaccgagaaggtgtacgacagggtgtctgtggaagccgtgcttccaatggacaaaaggctggacaggctgattagccactgcggacctgtgacgggttacatctttgcccttcttgcagtgtttaactttctgtttctgatttttcttcgctggatgacccctgacagcattatcgacgtggcgatagatgcgacgggccctagaggggcatggaccaacaactactcgcattccaagaggggtggcgaaaacaatgaaatttcagaaactaga

SEQ ID NO: 250784 - DNA, 1452 bp, synthetic construct
  misc_feature 1..1452: note = Description of Artificial Sequence: Synthetic coding sequence
  source 1..1452: mol_type = other DNA
atggcatgtcgaggtggagcaggtaatggtcatcgggcaagcgcaaccctgtcgcgtgtctcgccgggatccctgtacacctgtagaactagaactcataacatttgtatggtgtcagactttttctacccaaatatgggtggagtcgaatcgcatatctaccagctctcccagtgcctcattgaaaggggccataaggtcattattgtgacccacgcctacggtaacagaaagggtataagatacctgacttccgggctcaaagtgtactaccttcctcttaaggtgatgtacaaccagtcgaccgccacgaccctcttccattccctgccgcttctgcgctacatctttgttcgcgaaagggttaccatcattcacagccattcgtccttttccgcaatggcacacgatgccctttttcatgcaaaaactatgggcctgcaaacggtttttaccgatcattccctctttggatttgctgatgtgtccagcgttctcaccaacaaacttctgactgtgtccctctgtgacactaaccacattatctgtgtcagctatacctccaaggaaaacaccgtgcttagggctgcactcaaccctgagatagtgtcagtcataccaaacgcagtggacccgaccgactttacccctgatcctttccggagacacgatagcattactatcgttgtcgtgtcacgactggtttacaggaaaggcattgatcttcttagcggaatcatccctgagctgtgtcagaagtatcctgatttgaactttatcataggaggtgaaggacctaagcggattattcttgaggaggtgcgcgaacggtaccaattgcatgaccgggtgcgcctgttgggggcacttgaacataaagacgtcagaaacgtgctggtgcaaggacacatttttcttaacaccagccttactgaggccttttgcatggccatcgtcgaggccgcgtcatgcgggctgcaagtcgtctcgacgagagtgggtggaattccagaagtgctccctgaaaacctcattatcctttgtgaaccttcggtgaagtcactttgtgaggggctcgagaaggccattttccaactgaaaagcggtacgctccctgccccggaaaacattcataacatcgtcaagaccttttacacctggagaaatgtggctgaacgcaccgaaaaggtgtacgaccgggtgtccgtggaagcggtgctgcctatggacaaaagactggatagattgatcagccattgtggcccagtgactgggtacatctttgcactccttgctgtctttaactttctttttcttatcttcttgcgttggatgacgccagactcgattattgatgtcgcgatcgacgccaccggtccgagaggagcctggactaacaactacagccattcgaagcgtggtggagagaacaacgaaattagcgaaacccgg

SEQ ID NO: 250785 - DNA, 1452 bp, synthetic construct
  misc_feature 1..1452: note = Description of Artificial Sequence: Synthetic coding sequence
  source 1..1452: mol_type = other DNA
atggcctgccggggcggtgccggtaacggtcaccgtgcttccgcaactctgtcccgagtctcacctgggagcctgtacacgtgtcggacccgaactcataacatttgcatggtcagcgactttttctacccgaatatgggaggcgttgaatctcacatttaccaactctcgcagtgtcttatcgaacggggacacaaggtgatcattgtgacccatgcttacggaaaccgtaagggaattcggtaccttactagcggactcaaggtgtactaccttcctcttaaggtcatgtacaaccagagcaccgcaactacccttttccattcactccctcttctcagatacattttcgtgcgggaacgcgtgaccattattcattcgcattcctcgttctcggcaatggcacatgatgcacttttccatgccaaaaccatgggtctgcaaactgtattcaccgatcattcgctttttggatttgccgatgtgtccagcgttctcactaacaagctgctcactgtgagcctttgtgacaccaaccacattatctgtgtgtcgtacactagcaaggagaatactgtgctgagagcagctcttaaccctgagatcgtgtcggtgattccaaacgcagtggaccctacggattttactcccgatccgtttcgccgtcatgactcaataactatcgtggtggtgtcgcgccttgtctaccggaagggaattgatctcctgtccggaattatcccggagctctgtcagaagtaccctgatctcaatttcataattggcggagaagggccgaagagaatcattctcgaagaagtcagagaaagataccagcttcacgatcgggtgaggcttcttggagctctggagcacaaggatgtgagaaacgtcctggtgcaaggtcatatctttctgaacacttccctgaccgaagcattttgcatggcgatcgtggaagcggcctcctgtggacttcaagtcgtctcgacccgagtggggggtatccctgaggtcctgccagaaaacctcatcattctgtgcgagccatcggtcaagtcactttgtgagggactcgaaaaggcaattttccagctgaaatcggggactcttccagcgcctgagaatatccacaatatcgtgaaaaccttttacacctggcgtaatgtggcagagcggaccgagaaggtgtatgatcgagtgagcgtcgaggcagtcctgcctatggacaagagattggatcgccttataagccactgcggtcctgtcactggctacatttttgccctgcttgcagtgttcaattttctgtttcttatcttcctgagatggatgactcctgatagcatcatagacgtggctatcgacgcgaccggtcctagaggagcctggaccaacaactactctcattcgaagcgtggaggcgagaacaacgaaatctcggaaactcgc

SEQ ID NO: 250786 - DNA, 1452 bp, synthetic construct
  misc_feature 1..1452: note = Description of Artificial Sequence: Synthetic coding sequence
  source 1..1452: mol_type = other DNA
atggcctgcaggggcggcgcaggcaatgggcaccgagctagcgctacgctgagccgcgtgtcccccggtagcctctacacttgcaggacgcgcacccacaatatctgtatggtatccgacttcttctacccaaatatgggcggggtagagagccacatctatcagctgagccaatgcctgatcgaaagaggacacaaggtgataatcgtaactcatgcctacggcaatcgaaagggaattcgctacctgacttcaggcctgaaggtgtactacctaccccttaaggtgatgtacaatcagtctacagctactaccctgtttcattcactccctttactgagatatatttttgtgcgggaaagagtgacgattatccacagccacagcagcttctcggcaatggcccacgacgcactctttcacgccaaaacaatgggtcttcagacagtgttcacagaccatagcctgttcgggtttgcagacgtgtcctcagtgctgacaaataaattgctgactgtcagtctgtgcgatacaaatcatatcatctgtgtgtcctatacctccaaagagaatacggttctccgcgctgcccttaatccagagatcgtaagcgtcataccaaatgcagttgatcctaccgatttcacccccgatccattccgtcggcatgattctattaccatcgtggtcgtgtcacgcctggtgtaccgcaagggcattgatcttctgtctggcatcatcccggagctttgtcagaagtaccccgacctgaattttatcattggaggagaaggccctaagagaataatccttgaagaagtacgggaaagataccagcttcatgacagggtgagactgctcggagcactggaacataaagatgtacggaacgtcttggtgcaagggcacatatttctgaatacctcactcaccgaggccttctgcatggcaatcgttgaggccgcatcctgcggtttgcaagttgtgtctacacgggtcggcggcatccctgaggtgctgcctgagaacctcatcatcctttgcgaaccctcagtgaagtcactctgcgagggccttgaaaaggcgatctttcagctgaaatctgggactctcccggcaccagaaaatattcataacattgtcaagacattttacacatggaggaatgttgccgaaaggactgagaaggtgtatgaccgtgtgtcagtcgaggcggttttacctatggacaagcggctggataggctgatcagccattgcgggcccgtcactggatatatcttcgcgctgctggctgtatttaattttttgttccttattttccttcgctggatgacccccgacagcattatagacgtggccatcgacgccacgggaccacggggtgcctggaccaacaattactcacatagtaaacggggcggagagaacaatgagatctccgagactcgt

SEQ ID NO: 250787 - DNA, 1452 bp, synthetic construct
  misc_feature 1..1452: note = Description of Artificial Sequence: Synthetic coding sequence
  source 1..1452: mol_type = other DNA
atggcctgccgtggaggtgcgggaaacgggcacagagcttctgcaaccctcagccgggtttcacctggctccctttacacgtgccggactagaactcataacatttgcatggtgtcggacttcttctacccgaacatgggcggcgtggaaagccacatctaccaattgagccagtgtctgattgaacgcggccacaaggttatcatcgtgactcatgcgtacggtaatagaaaaggaatccgctacctcacttcgggactgaaagtctactacctgcccctcaaggtcatgtacaatcaaagcactgccaccaccctcttccattctctgccgcttctccgctacattttcgtgcgcgaacgcgtgacgatcatccactcgcattcatcattctccgcaatggcacacgatgccctgttccacgcgaaaactatgggcttgcagactgtgtttactgaccattccctctttgggttcgcagacgtgtcatcagtgttgactaacaaacttcttacggtgtcactgtgcgataccaatcacatcatctgcgtctcctatacctccaaggaaaacacggtgctccgggccgcgctcaatcctgagatagtgtcggtgatcccaaacgccgtggatccaactgactttaccccggatcccttcagacggcatgattcgatcaccattgttgtggtgtccagactggtctaccggaagggaatcgatctcctgtcagggatcatccctgagctgtgtcaaaagtacccagacctgaacttcataatcggaggcgaggggcctaagcggattattctggaagaagtcagggaacggtaccagctccatgaccgtgtgagactgctcggtgcactggagcataaggacgttcgaaacgtgctggtccagggtcacatcttcctgaataccagcctgacggaagcgttctgcatggccatcgtcgaagccgcttcctgcggtctgcaagtcgtgtccacccgagtggggggaatcccggaagtgctgccggaaaacctgattatcctgtgcgagccgtccgtcaagtcattgtgtgagggcctcgagaaggcaatctttcagctgaagtccggaaccctgccggctccggaaaacatccacaacatcgtcaagaccttttacacctggcggaacgtggcggaacgcactgagaaggtgtacgatcgcgtttcagtcgaggcagtcctcccaatggacaagcgactcgaccggctgatctcgcactgtggacccgtgactggatacatttttgcactgttggccgtgttcaatttcctcttcttgatcttcctgcggtggatgaccccggacagcatcatagatgtcgccatcgacgcgacgggaccacgcggagcctggacgaataactattcgcactcgaaaagaggaggtgagaataacgagatctccgaaactagg

SEQ ID NO: 250788 - DNA, 1452 bp, synthetic construct
  misc_feature 1..1452: note = Description of Artificial Sequence: Synthetic coding sequence
  source 1..1452: mol_type = other DNA
atggcatgcagaggaggagcaggcaacggtcatagggcctccgcgactctgtcccgagtcagcccaggctccctttacacctgtcgaactagaacccacaatatctgcatggtgtcggatttcttctacccgaacatgggtggggtggagtcacacatataccaactttcacagtgtcttattgaaagaggacataaagtgatcatcgtgactcatgcatacggcaataggaaaggaatcaggtacctcaccagcggactgaaagtgtactaccttcctctgaaggtgatgtataatcagtcgaccgcaactaccctgtttcattcgctcccactccttcggtacattttcgtccgggaacgggtcacgattatacatagccattcgtcgttttccgcaatggcacatgatgcactgttccacgcaaagaccatggggcttcagaccgtgttcaccgatcatagcctttttggatttgctgacgtgtcatcggtgttgaccaataaactgctgaccgtctcactgtgcgatactaaccacatcatttgtgtgtcgtacaccagcaaggaaaatactgttctgcgcgcggcccttaaccctgaaattgtttccgtgattcccaatgcggtggatcctactgactttacgccggacccatttcgcagacacgattccattactattgtggtggtgtcacggcttgtgtacagaaaaggaatcgacctgctgagcggcattattcccgagctgtgtcaaaagtacccagatttgaactttatcattggaggggagggccccaagagaatcattctcgaagaagtgagagaaagataccaactgcatgatagagtcagactgctgggtgcactggaacataaggacgtgcgaaacgtgcttgtgcaaggtcacattttcctgaatactagcctgactgaggcattctgtatggctatcgtggaggccgcatcctgtggcctgcaggtggtgtcgaccagagtgggcgggataccagaagtgctgcccgaaaacctgattatactgtgtgagccatcagtcaagtccctttgtgaagggctcgaaaaagcaatctttcaactgaagtcgggaaccctgccggcacctgaaaacatccacaatatcgtgaaaacgttctacacctggaggaacgtggcggaacgaactgaaaaggtgtacgatagagtgtcggtggaggcagtgttgccaatggataagcgacttgatagactgatctcccactgtggtccagtgacgggatacatatttgcactgctcgccgtgtttaactttttgtttttgatttttcttcgctggatgactccagattccattattgacgtggcaatcgacgcaacgggacccaggggcgcatggaccaacaattacagccattcaaagagaggtggggaaaacaacgaaatttcggagacgaga

SEQ ID NO: 250789 - DNA, 1452 bp, synthetic construct
  misc_feature 1..1452: note = Description of Artificial Sequence: Synthetic coding sequence
  source 1..1452: mol_type = other DNA
atggcttgtcggggaggagcgggtaatggacatagggcgtccgcaaccttgtccagagtcagccccggatccctgtatacttgtcggacacggacccataacatctgcatggtctctgactttttttatccgaatatggggggagtagaatctcacatataccagctatctcagtgcctgatagagcggggacataaagttataatagtcactcatgcctatggcaacagaaaggggatccgctatctgacgtcaggattgaaggtctattatttacccttgaaagtgatgtataatcagtcaaccgccaccaccctgtttcactctctgcccttactgcgttatatcttcgtccgtgaacgcgtgacgattatacacagccacagctctttttctgccatggcccacgacgcactcttccatgctaagaccatgggcttgcagaccgtcttcacagatcacagtctttttggcttcgccgacgtctcctcagtcttgactaacaagctgttaacagtgtcattatgtgatacaaaccacatcatctgcgtttcatatacctctaaggagaacacagtgctacgcgctgctctgaaccctgaaatcgtaagtgttatccctaatgccgtggatcccaccgatttcaccccagacccttttcgccggcatgacagcatcaccatcgtagtcgttagccgcttggtgtaccggaaagggattgacctcctctcaggaataatccccgagttgtgtcagaagtacccggaccttaactttatcatcggcggggaaggaccaaagcgtatcattctcgaggaagtgcgggagcgctaccagcttcatgatcgggtcagactactgggagcgctggagcacaaggatgtccggaatgtgttggtacaggggcacatcttcttgaacacaagcctgaccgaggccttttgtatggctattgtggaagccgccagctgcgggctccaagtcgtgtccaccagggtcggaggcattcccgaggtgctgcccgagaatcttatcattttatgtgaacctagcgtgaaatccctttgcgagggcttggagaaagcaatttttcagttgaaatctggtaccctgccagctccagagaatattcacaatattgtcaaaaccttctatacatggaggaacgtggctgaacggacggagaaagtttatgacagggtgagcgttgaagctgtgcttcccatggataagaggctcgaccgactgatatcacattgtggtccggttaccggatatattttcgcactgcttgctgtcttcaactttttgtttctcatatttctcaggtggatgacccccgattcaatcatagacgtggcgattgatgcaaccgggccacgcggtgcttggacaaacaactactcccacagtaaaaggggcggcgaaaataacgaaatctctgagacgaga

SEQ ID NO: 250790 - DNA, 1452 bp, synthetic construct
  misc_feature 1..1452: note = Description of Artificial Sequence: Synthetic coding sequence
  source 1..1452: mol_type = other DNA
atggcatgccgtggaggagcaggcaatggacatagagcatccgccactctgtcaagagtgtcccctggctccctttacacctgccggaccagaacccataacatctgcatggtgtcggactttttctaccccaacatgggaggggtcgaatcgcacatctaccagctgagccaatgtctcatagaacgtggacacaaagtgattattgtgacccatgcctacggaaaccgaaagggaattcgctaccttactagcggtttgaaagtgtactaccttccactcaaggtgatgtacaaccaatccaccgccactaccctctttcactcgttgccactcttgaggtacatctttgtccgagagcgcgtgaccattatccatagccattcgtcattctccgctatggcacatgatgcactgttccatgcaaagacgatgggattgcaaaccgtgtttaccgatcactcgctgtttggattcgctgatgtgtcctccgtgcttaccaataagttgctcactgtctcattgtgtgacacgaaccacataatctgtgtgagctacaccagcaaggaaaacacggtgcttcgagcagcacttaacccggaaatagtgtccgtgattccaaatgcagtggatcccactgattttactccagatccctttaggcggcatgactcaattactattgtcgtggtgagcagacttgtctatcgcaaaggaatcgaccttctgtcaggcattatcccagaactgtgccagaaatatcctgatctcaacttcatcataggcggtgagggtcccaagagaattatcttggaggaggttcgagaaaggtaccaattgcatgatcgagtgcggctccttggtgcactcgaacacaaggacgtgcggaacgtcctggtgcaaggacacatcttcctcaacacctcccttactgaggccttctgtatggccattgtcgaagcagcaagctgtggtctgcaagtggtgagcactagagtcgggggtatcccggaggtgctgccagaaaatctcattatactttgtgaaccttcggtcaagtctctgtgtgagggtctggaaaaagccatttttcagcttaagtccggcacccttcctgcaccagagaatattcataacattgtgaaaaccttttacacttggcggaacgtggcagaacgcactgaaaaggtttacgatagagtgtcagtggaggccgtgctccctatggacaagcgtctggacaggctcattagccattgtggaccggtgactgggtacattttcgctttgctcgcagtgtttaactttctgtttctgattttccttcgctggatgactcctgactctattatcgatgtggcaatcgacgcaaccggtcctcgcggagcttggaccaataactacagccacagcaagcggggcggcgaaaacaatgagatttccgaaaccaga

SEQ ID NO: 250791 - DNA, 1452 bp, synthetic construct
  misc_feature 1..1452: note = Description of Artificial Sequence: Synthetic coding sequence
  source 1..1452: mol_type = other DNA
atggcttgccgcgggggggctggcaatggacatcgggcttcagccaccctgtctagggttagcccgggatccctctacacctgcaggacgcgcactcataatatctgtatggtgtcagatttcttctatccgaacatgggaggcgtggagagccatatttaccagctctctcagtgccttattgagaggggccataaagttattattgtgacccatgcgtacggcaatagaaagggcatccgctacctcacaagcggtctgaaagtttactacctgcccctgaaggtgatgtacaatcaatccacggccaccacgctgttccactccctgccactgcttcgatacattttcgttcgcgaaagggttaccatcatccattcccactctagcttcagcgctatggcccatgatgcgctgttccatgccaagacgatgggactccaaaccgtgtttaccgaccactctctgttcggtttcgctgacgtttctagcgtgctcaccaacaaactccttacagtttcgctgtgcgacacaaaccacataatatgtgttagctatactagtaaggaaaataccgtcttgagggctgccttgaatcccgaaatcgtgagcgtgatccctaacgctgtagacccaaccgatttcacccccgatccatttcgaagacatgactctatcaccattgtggtcgtgtcgaggctcgtttaccggaaagggattgacctgctgagcggtatcattcctgaactgtgccagaagtatccggacttaaattttatcattggaggtgaaggaccgaagcgcatcatcctggaggaagtgagagaacgttatcagcttcatgatcgggttcggcttttaggggcactcgagcacaaagatgtgagaaacgttctcgttcagggtcatatctttctgaatacttctctgacggaggccttctgtatggccatcgtggaggccgcttcatgcgggctgcaggtggtgtctacaagagttggaggtatccccgaggtgctcccagagaatctaataatcctgtgcgaaccgagcgtgaaatctttgtgtgagggactcgagaaggctatctttcagctgaagtctggcacccttcccgctcccgagaatatacacaatatagttaaaaccttttacacctggcgcaacgtggccgagcggaccgagaaggtctatgaccgggtgagcgtagaagcagtgcttcccatggacaagcgactcgacaggctcattagtcattgcggacctgtgaccggctatatcttcgccctcctcgccgtgtttaacttcctcttcctgatttttctaaggtggatgactcccgactcgattatcgacgtggcgatagacgcaaccggcccaagaggggcctggacgaacaattatagtcactccaagcggggaggcgagaacaacgaaatatctgaaacgcgg

SEQ ID NO: 250792 - DNA, 1452 bp, synthetic construct
  misc_feature 1..1452: note = Description of Artificial Sequence: Synthetic coding sequence
  source 1..1452: mol_type = other DNA
atggcatgcaggggaggggccggaaatggacacagggcttccgcaaccctgtcacgagttagcccaggctcgctttacacttgtaggacccggacccacaatatttgtatggtgtctgatttcttctatcccaatatggggggggtagagtcccatatttatcagctcagtcagtgcctcatagagcgtggacacaaggtcattatcgtaacgcatgcctatggtaaccgaaaaggcataagatatcttacgagtggcctgaaagtgtattatctaccgcttaaggttatgtataaccagtccacggctacaactctttttcatagccttccactgctgcgatatatcttcgtgcgggaacgagtgacaatcatccattcacactcatctttttctgcaatggcccatgacgcgttgttccacgctaagaccatggggcttcagacagtattcactgaccacagcttgtttggatttgcggatgtgtcctctgttctgaccaataagctccttaccgtgagtctctgtgacaccaaccacattatttgtgtgagttacaccagcaaggagaacactgtgttacgcgcggcacttaaccctgagattgtgagtgtgataccaaatgccgtggatcctacagattttacccctgaccccttccgaaggcatgattccattacgatcgtcgttgtcagtcgcctcgtttaccgaaaaggcattgacttattgtctggaataataccggaactatgtcagaagtaccccgatctaaattttattattggtggagagggccccaagagaatcatcctcgaggaggttcgcgagagataccagctgcatgatagagttcgactgctcggtgccttggaacacaaggacgtgcgtaacgtgctcgtgcaggggcacatcttcctgaatactagtctgacagaggctttctgcatggccatcgtcgaagctgcgtcatgtggccttcaggtggtgtccacaagggtagggggtatcccagaggtactgccagagaatctgataattctctgcgagccctctgttaagtctctgtgcgaaggccttgaaaaagctatctttcagctgaagagtggtaccctgcccgccccggaaaatattcataacatcgtgaagacattctacacttggcggaacgttgccgaacggacagagaaagtttatgatagagtctcagtcgaggccgtgttgcctatggacaagcgactggatcgcctgataagccattgcggcccagtcacaggctatatctttgcgttgctcgctgtgtttaatttcctgtttttgatatttcttagatggatgacccccgactctattattgacgtggccatagatgccacggggcctaggggcgcatggaccaacaactactcgcatagtaaacgcgggggagaaaacaatgagatctccgaaacgcga

SEQ ID NO: 250793 - DNA, 1452 bp, synthetic construct
  misc_feature 1..1452: note = Description of Artificial Sequence: Synthetic coding sequence
  source 1..1452: mol_type = other DNA
atggcctgcagaggtggagcgggaaacggacaccgcgcctcagctaccctgtcccgggtgtccccgggatcgctttacacctgccggactaggactcacaacatttgtatggtttccgacttcttctatccgaatatgggcggcgtggagtcgcacatctaccagctctcccagtgcctcatcgagaggggacacaaggtgattatcgtgacccatgcatacgggaacagaaagggtattcggtacctcaccagcggacttaaggtgtactatctgcccctgaaggtgatgtacaatcagtcaaccgcaactactctgttccactccctcccactgctgaggtatatcttcgtgcgggagcgggtgaccatcatccactcacattcatcgtttagcgcaatggcgcacgacgctctgtttcacgccaaaaccatgggtttgcagacggttttcaccgaccactccctcttcggcttcgccgacgtttcgtctgtcttgactaacaaactgctgaccgtctcgctttgcgacactaatcacatcatttgtgtgtcttacaccagcaaggaaaacaccgtgctccgggccgccctcaaccctgagatcgtctccgtgatcccaaacgcagttgatccaaccgattttacgccagaccccttcaggcggcacgattctatcaccatcgtggtggtgtccagactggtctaccgcaagggtatcgatttgctctccggaattatcccggaactgtgccaaaagtacccggacctgaacttcatcatcggaggggagggaccgaagcggatcattttggaggaggtgcgagaacgctaccagttgcatgaccgagtgagactcctgggggcactcgaacacaaggacgtccgaaacgtcctggtgcagggccacatcttcctgaacacttcattgactgaagcgttctgcatggcaattgtggaagctgcatcatgcggtctgcaggtcgtttcgactcgcgtgggcggcattccggaggtgctgcctgagaatttgatcatcctctgcgaaccgtcggtgaagtccttgtgtgaaggacttgaaaaggctatcttccagctgaagtcgggcaccttgcctgctcctgaaaacattcacaacatcgtgaaaactttttacacctggaggaacgtggcagagcgtaccgaaaaggtctacgacagggtgtccgtcgaagccgtgcttcctatggataagcgcctcgatcggctgatctcacactgcggacccgtgaccggatacatcttcgccttgctggccgtattcaatttcctgtttctcattttcctgcggtggatgactccggattcgatcatcgacgtggcgattgacgcgactggcccacggggcgcctggaccaataactactcgcattccaagagaggtggggaaaacaatgagatcagcgagactaga

SEQ ID NO: 250794 - DNA, 1452 bp, synthetic construct
  misc_feature 1..1452: note = Description of Artificial Sequence: Synthetic coding sequence
  source 1..1452: mol_type = other DNA
atggcttgcaggggcggggccggcaatggacatagagcttctgccaccctttcaagagtgtcacctggatccctgtatacgtgcaggacaagaacccataatatatgcatggtatctgattttttctaccccaacatgggtggggtagaatcccacatctatcagctcagccaatgtcttatagagcgcggccataaggtgattatcgtcacccacgcttacgggaatcggaagggaattaggtacctgaccagtggcctaaaggtgtactatctgcctctgaaggtgatgtataaccagtcaaccgctaccaccctgtttcatagcctacccctgctgcgctatattttcgtccgggagagagttacaattatccatagccactccagtttttctgcaatggctcatgacgctctgtttcatgcaaagaccatgggtctccagacggtgtttacagaccatagcctgtttggctttgcagatgttagcagcgttcttaccaacaaattgttaaccgtgagtctgtgtgatacgaatcatattatctgcgtctcatatacctctaaggagaacaccgtactgcgcgctgcactgaatcccgagattgtgtccgtgatacctaacgcggtcgaccccactgacttcacccccgatccttttcgtcgccatgacagtatcacaatcgtggtggttagtcgcttggtctaccgaaagggcattgacctactctcgggtattatccctgagctttgtcagaaatacccagacctaaactttattatcggcggtgagggaccgaagaggatcatactcgaagaggtgcgcgaacgctaccagctgcacgacagggttcggctgctgggggccctggagcataaagacgtgagaaacgtcctcgtccaagggcatatcttcctaaacacctccttaacagaggcattctgcatggccattgtggaggctgcatcctgtggcctgcaggtcgttagtacacgggtggggggtatccctgaagtgcttcccgagaacctaatcatactgtgcgagccaagcgttaaatctctgtgcgagggcctggagaaggcgatattccagctcaagtccggtacattgcctgcgccagagaacattcacaacatagtcaaaaccttttacacctggaggaacgttgccgagagaaccgagaaagtctacgacagagtgtccgtcgaagccgttctgcccatggataagaggctggacagactgatctctcactgcggaccagtcaccggctatatatttgctcttctggctgtttttaacttcctgttcctcatctttttacggtggatgacgcccgatagcattattgatgtggcaattgacgcgactgggccccggggcgcgtggactaataactacagccactccaagagaggtggggagaataatgaaataagtgagacacgg

SEQ ID NO: 250795 - DNA, 1452 bp, synthetic construct
  misc_feature 1..1452: note = Description of Artificial Sequence: Synthetic coding sequence
  source 1..1452: mol_type = other DNA
atggcctgcagaggtggagccggtaacggtcacagagctagcgccaccctgtcccgggtgtctcctggaagcctttatacctgccgcactcgcacacataatatctgcatggtgtctgacttcttctaccctaatatgggtggtgtggaaagccacatttaccaacttagccagtgcctcatcgaaaggggccacaaagtgatcattgttacccacgcttatggaaacaggaagggcatcagatacctgacgtcgggactgaaggtgtattatttgcctctcaaagtgatgtacaaccaaagcaccgcaaccaccctgtttcacagcctccccttactgagatatatctttgtccgcgagagggttactatcatccattcacatagcagcttcagcgccatggcacatgacgctctgtttcatgctaaaacaatgggcctgcagacagtgttcaccgaccatagcctattcggtttcgctgatgtctccagcgtgttgaccaacaagctgctcaccgtcagcctctgcgataccaaccacatcatctgtgtaagttataccagtaaagagaacactgtgctccgcgccgctctgaaccccgaaatagtgtccgtcatcccgaacgctgtcgaccctaccgacttcacccctgatcctttcaggcgtcacgatagcataactatagtggtggtatcacggctcgtgtaccgtaaaggaatcgacctgctgtcgggaatcattcctgaactgtgccaaaaatatcccgacctgaattttataatcgggggtgagggaccaaaaagaatcatattagaagaggtgcgcgaacgctaccaactgcacgatcgtgtgagactgctcggagctcttgaacataaggacgtaaggaacgtgctcgtgcagggtcacatcttcctcaacacaagcctgactgaagctttctgtatggccattgtcgaggccgctagctgcggccttcaggtggttagcacaagagtgggtggtatcccggaagttctccccgagaacttgatcatactctgtgagccatctgtcaaaagcctgtgcgagggtctggaaaaagccatctttcaacttaagagcggaacattgccggctcccgagaatatccacaacatcgtcaaaacgttttacacctggaggaacgttgcagagaggacagagaaggtctacgatagggttagtgtcgaagcagtgttgcctatggacaagagactggacagacttatttctcattgcggcccagttaccggctacatctttgcactgctcgctgtgttcaactttctgtttctgattttcctgagatggatgactcctgatagtattatcgacgtggcaatcgatgccacaggacccaggggggcctggaccaataattatagccacagcaaaaggggaggcgaaaataatgaaatcagcgagacacgg

SEQ ID NO: 250796 - DNA, 1452 bp, synthetic construct
  misc_feature 1..1452: note = Description of Artificial Sequence: Synthetic coding sequence
  source 1..1452: mol_type = other DNA
atggcatgcaggggaggagccggcaacggtcatcgggcatcggccactctttctcgggtgtctcccggaagcctgtatacgtgtcgaaccagaacccataacatctgtatggtgtccgacttcttttaccccaatatgggcggggtggaatcacacatctaccagctttctcagtgcctgatagaaagaggacataaagtgataatcgtcacgcatgcctacggaaacagaaaaggcattaggtacctgacctccggtcttaaggtgtattacctcccactgaaggtgatgtacaatcagtcgaccgcaaccaccttgttccactccctgccacttctgcggtacatctttgttcgtgaacgggtgaccattatacactctcactcatcatttagcgcaatggcacacgatgcactctttcatgctaagacgatggggcttcaaactgtgtttactgaccatagcctgttcgggtttgcggacgtttcatcagtgctgacgaataagttgctgaccgtgtcgctttgtgataccaaccacattatctgcgtctcctacacttccaaagagaatactgtgctgcgtgcggcattgaacccggaaatcgtctcggtcatcccgaatgccgtcgaccctactgatttcacccctgacccattccggcggcacgatagcattacgattgtggtggtgtcgcgccttgtctaccgaaaaggaatcgaccttttgtccggtataatccctgaactttgccagaagtacccagatctgaactttatcattgggggtgagggacctaaacgaatcatacttgaagaagtgcgagaaaggtaccaactccatgatagagtgcgcctcctcggagcgttggaacataaggatgtcagaaacgtcctggtccagggacacattttccttaacacttccctgaccgaggcattttgtatggccattgtggaagccgcaagctgtggtttgcaagtggtcagcactcgcgtgggtggcatccctgaggtgcttccggagaatctcattattctgtgtgaacccagcgtcaagtcattgtgtgagggcttggaaaaggccatttttcaacttaagtccgggacccttccagcaccggaaaacattcacaatattgtcaagaccttttacacgtggcgcaacgtggccgagcgtactgaaaaagtgtacgatcgggtgagcgtcgaggcggtgctgcctatggataagagacttgacagactgattagccattgcggacctgtgactggttacatttttgctcttctggcagtgtttaactttttgttcctgatttttcttcggtggatgaccccagactccattatagatgtggctatcgatgcaaccggaccacgtggagcatggaccaacaattactcgcactcaaagagaggaggtgagaataacgagatatccgaaactcgg

SEQ ID NO: 250797 - DNA, 1452 bp, synthetic construct
  misc_feature 1..1452: note = Description of Artificial Sequence: Synthetic coding sequence
  source 1..1452: mol_type = other DNA
atggcctgccggggtggcgcaggaaatggacatcgggcctccgccacacttagccgagtgtcaccaggatcactctatacctgcaggacacgtacccacaacatttgtatggtcagtgattttttttaccccaacatgggaggagtggagagtcacatttatcagctgtcacaatgtctcatcgaacggggacacaaggtgattatagttacccacgcctatggcaacagaaaggggatccgatacctaaccagcggactgaaagtgtactatctgccactgaaggtcatgtataaccaaagtacggcaaccactctcttccactctttacctctcctgaggtacattttcgtgcgtgagcgtgtgaccataatacacagccacagctcattttctgccatggcccacgatgccctgttccacgctaagacgatgggactgcagacagtcttcacagaccatagtctctttggatttgccgatgtgtccagtgtccttacgaataaactgctcaccgtgtcattgtgtgacacgaatcatatcatctgcgtcagctatactagcaaagagaacacagttctgagggcggctctgaacccagaaatcgtgtcagttatcccaaacgccgtggatccaactgattttacccctgatccattccgacgacacgatagcattaccatcgtggttgttagccgactggtctatcgtaaaggcatagaccttctctctggcattatacccgagctgtgccaaaagtatcccgatctcaactttataatcgggggcgaggggcctaaacgaattatcctggaggaagtccgcgaaaggtaccagctgcacgacagagtcaggctgctgggagctctggagcacaaagacgtgaggaacgtcctcgtccaagggcacatcttcctgaacaccagcctgacagaagcgttttgtatggcaatcgtggaggcagcctcttgcgggctgcaggttgtgagcaccagggtgggggggatcccggaagtgttgcctgagaatcttattatactctgtgagccttcggtgaaaagcctctgcgaaggcttagagaaggcaatcttccagctgaagtctggaaccctgcccgccccagaaaatatccacaacatcgtgaagaccttctacacctggagaaacgtagctgaacgcaccgaaaaagtctacgaccgggtcagcgtggaggcagtgctacctatggataagaggctggaccgattaatcagtcactgtggaccggtgaccggatacatctttgcgctgctggccgtgttcaactttctgtttctgattttcctgcgatggatgacacccgattccataattgatgtggctatcgacgccacaggacctcggggcgcatggactaacaactactcacactcaaaacgagggggagaaaataatgaaataagtgagacgcga

SEQ ID NO: 250798 - DNA, 1452 bp, synthetic construct
  misc_feature 1..1452: note = Description of Artificial Sequence: Synthetic coding sequence
  source 1..1452: mol_type = other DNA
atggcatgccgtggtggggccggtaacggacatcgtgcaagcgcaaccttgagcagagtctcacctggatccctatatacttgtagaacccgaacacataatatttgcatggtaagcgactttttctatcctaatatggggggggtggagtcccacatctatcagttgtcacagtgtctgatcgagcgcggacacaaggtgatcatcgtaacacacgcctacgggaaccgcaaaggcattcggtatttaacctcaggtcttaaagtctactacttgcctttaaaggtcatgtataaccaaagcaccgccacaactctatttcatagcctgcctctgctgcggtatattttcgtgcgcgagcgggtcaccatcattcattcccactccagcttcagcgctatggcgcacgatgctcttttccatgctaagactatgggcctgcagactgtgttcactgatcatagtctgtttgggtttgcggatgtgtcaagtgtgctcactaataagttgttgactgttagtctgtgcgacacaaatcatatcatctgtgtgagttatacctcaaaggaaaacacagtgctgcgggccgctctcaacccagagatcgttagcgtgattcccaacgccgtcgatcctacagactttacacccgatccttttcgtcgtcacgattctatcaccattgtggtcgtcagccggctggtgtaccggaagggtatcgatttgctcagcggaattatccctgaactgtgccagaagtatcctgacctgaatttcatcatcggtggtgaaggccccaagagaataattcttgaagaagtcagagagaggtaccaattacacgacagagtaagactgctaggagctctcgagcacaaggatgtacgcaacgtgctggtccagggtcacatatttctaaacacaagtctcaccgaagccttctgtatggcaatcgtggaggcagcttcttgcggcctccaagtggtgagcactagagtgggagggatacccgaagtgttgcccgaaaacttaatcatcctttgcgagccaagtgttaagtcactttgcgagggcctcgagaaggccatattccagctgaagtctggcaccctccctgctccagagaatatccacaatatcgtcaaaacattctatacctggagaaacgtggctgaaaggactgaaaaggtctatgacagagtcagcgtcgaagcggtgttgcctatggacaagcggcttgatcggctgattagtcattgcggacccgtcaccggctacatcttcgccctcctggcggtcttcaacttcctgtttctcatcttcctgcgctggatgactccagatagtattattgacgtggctattgacgccactggtccgaggggtgcatggacaaataattattcccattctaagcgggggggtgagaacaacgaaatcagtgaaacgagg

SEQ ID NO: 250799 - DNA, 1452 bp, synthetic construct
  misc_feature 1..1452: note = Description of Artificial Sequence: Synthetic coding sequence
  source 1..1452: mol_type = other DNA
atggcgtgccggggtggcgctggtaacggacaccgtgcgagcgccacactgagcagggtaagcccgggatccttgtatacgtgcaggacgcggacccataacatctgtatggtgtccgattttttctaccctaatatgggtggtgtggagtcacacatataccagctcagccagtgcctgatcgaacgcgggcacaaggttatcattgtgacacatgcctacgggaaccggaaggggatccgatatctaacttcaggtcttaaggtctactatcttccattgaaggtcatgtacaaccagagcacagctactacactgtttcactccctgcccctcttgcgttatattttcgttcgggagagagtaactattattcactcacattcatctttctctgccatggctcatgatgccctttttcacgctaagacaatgggactgcagactgtgtttaccgaccactcacttttcggctttgccgatgtatcttcagtgctcaccaacaagttgctcaccgtcagcctatgcgataccaatcatatcatttgcgtctcttatacttccaaggaaaacactgtattgagggcggctttgaatcctgagatcgtgagtgtaataccaaacgcggtggaccccactgacttcacccctgaccccttcaggcgtcatgattcgatcacgatcgtggttgttagtcgcctcgtatatagaaaaggcatagatcttctttctggcatcataccagaattgtgtcagaagtacccagaccttaattttatcattggcggagaggggccaaagcggatcatattggaggaggttcgcgagcgctatcagctgcacgacagggtgcggctgctaggcgccctcgagcacaaggacgtgcgaaatgtcctggtgcagggtcatattttcctgaacaccagcctcaccgaagcattttgcatggcaatcgtcgaagccgcatcttgtggtttgcaggtagtgtcaacaagggttggtgggatccccgaagtgctgcccgagaacctgatcatactctgtgaaccttctgtcaagtccctctgcgagggcttggaaaaagctattttccagcttaagtcgggaactctgccggctccagagaacattcataatatcgtcaaaaccttttatacctggcgaaacgtggccgagaggacggaaaaggtctatgaccgcgtgtcagttgaggcggtactgccaatggacaagagactggatagactcatcagccactgtggcccggtaacaggctacatcttcgccttgctggctgtcttcaatttcttatttctgatatttcttcggtggatgactcccgacagcattattgacgtggccatcgacgctacaggaccccgaggcgcgtggactaataactactcacatagcaagaggggcggcgagaacaacgaaatctccgaaactagg

SEQ ID NO: 250800 - DNA, 1452 bp, synthetic construct
  misc_feature 1..1452: note = Description of Artificial Sequence: Synthetic coding sequence
  source 1..1452: mol_type = other DNA
atggcgtgtagagggggcgccgggaacggccatagggcttccgccaccctgtctcgtgtgagtcctggaagtctgtatacctgcagaacaagaacccataacatctgcatggtatcagacttcttctacccaaacatggggggcgtggaaagccacatataccagttatcacagtgtctgatcgaacgcggccataaagttatcatcgtgacccacgcctatgggaacaggaagggtatccgctatctcacttcaggcctaaaggtgtattatcttccactaaaagtgatgtataatcagtctacagctacaaccctgttccatagccttccgttgctgagatacatcttcgtgcgagaacgtgtgactatcattcattcccatagttcattttccgccatggcccatgacgcactgttccacgccaaaactatgggcctgcagactgtctttaccgaccattccctttttgggtttgccgacgtgtcatccgtgctcactaacaagttactgactgtgtcactgtgcgacacaaatcatatcatctgcgtcagctacacatcaaaagagaataccgtcctgcgtgctgcgctaaaccctgaaattgtgtcagttattcccaatgcggttgatcctaccgatttcacacctgatcctttccggagacacgatagcattacaattgtagtcgtatcccgccttgtgtacaggaagggcattgatctcctttctggcattatacctgagctttgtcagaaataccctgacctgaacttcatcattggaggggaaggaccgaaaaggatcattttagaggaagtcagggagcggtaccagctgcatgatagggttcgcctgctcggagccctggagcataaagatgtccgaaatgtgctggtccagggtcacatatttttgaacacatccctcaccgaagctttctgtatggccatagtagaagcagcgtcatgcggcctgcaggtcgtgtcaactcgagtagggggaattcctgaggtgctgccagaaaatttaatcatcttgtgtgagccctcggtcaaatcgctttgcgagggcctggaaaaggccatattccagttgaagtcaggcactttgccagcacccgaaaacattcacaatattgtaaagaccttctatacgtggcgcaacgtggctgaaaggactgagaaggtttatgacagagtcagcgttgaagcagtcctccccatggataagaggctggaccgattgatctcgcattgcggccctgttactgggtacatttttgctctactggcggtcttcaactttttgtttctaatcttcttacgctggatgacgcccgacagcattattgacgtagccattgacgccaccggcccacggggtgcctggacgaacaattactctcacagtaaaaggggcggcgagaacaatgagatctccgaaacgagg

SEQ ID NO: 250801 - DNA, 1452 bp, synthetic construct
  misc_feature 1..1452: note = Description of Artificial Sequence: Synthetic coding sequence
  source 1..1452: mol_type = other DNA
atggcttgcagagggggcgctggtaacgggcacagggcctcagccactttatcccgagtgagtccaggttcgctctatacttgccgcactcgcacacataacatttgcatggtctcggattttttctatccgaatatggggggtgtcgaaagccatatttaccagctgtcacaatgcttgatagaaagaggacataaggtgattatcgttacacatgcctacgggaatagaaagggtattcgctatcttacttcaggactgaaagtatattatttgccactgaaagtaatgtataatcagagtaccgctacgacgttgtttcactcactcccgttacttcgatatatttttgtacgagagcgagttacgatcatccactcacatagttctttctccgcaatggctcatgatgcgctgtttcatgctaaaacgatgggcttacaaacggtctttacggaccatagcctgtttggcttcgccgatgtttcatcggtgttaacgaacaaacttcttactgtcagcttgtgtgacaccaaccatattatctgtgtgtcatacacaagcaaagaaaatacggtcctgcgcgcagccctgaatcctgaaattgtttcagtaatcccgaatgctgtggatccgaccgatttcacacctgatccgtttcgcagacatgattccattacaattgtcgtagtgagtcgtctagtttaccgtaaagggatagatttgcttagcggaatcattcctgaactttgccagaaatatccggatcttaattttattatcggcggtgagggacctaaacgtataatattagaggaagtaagggagagatatcagttgcatgatcgtgtcagactcttgggagcactggagcataaggacgtcagaaatgttttggttcaaggccacatttttttgaatacatctctcacggaagcattttgtatggccatcgtggaagcggcttcatgtggccttcaggttgtttcaacgagagtcggaggaattcctgaagtgctacctgagaatttaatcatcctttgtgaaccctccgtaaaatcgctttgtgagggccttgagaaagcgatttttcaattaaagtccggaacgttgccagctccggaaaacattcacaatattgttaagacgttttacacgtggcggaacgtcgccgagcgcacggagaaagtttacgatagggtgtcagtcgaagccgtactgccgatggataaacgccttgataggctaataagtcattgtggcccagtcacggggtacattttcgcgctgcttgcggtatttaattttctgttccttatcttcttaagatggatgacccccgattctatcattgatgttgcaatcgatgcaacgggacctcgcggggcgtggacaaataattactctcatagtaaacggggcggagaaaacaacgagatctccgaaacacgg

SEQ ID NO: 250802 - DNA, 1452 bp, synthetic construct
  misc_feature 1..1452: note = Description of Artificial Sequence: Synthetic coding sequence
  source 1..1452: mol_type = other DNA
atggcttgtaggggcggcgccggtaatgggcatagggcctcagctaccctaagtcgcgtatcacccggatccttgtacacctgccgcacccgcacgcacaatatttgcatggtctctgacttcttctatcctaatatggggggcgtggagtcacacatttatcagttgtcccaatgcctgatagagcgaggtcacaaggtcatcatcgttacacacgcgtacggcaaccgaaaaggaatcaggtatctgacatctgggctcaaggtttattacttgcctctgaaagtcatgtataatcagtcaactgccactactctgtttcactctctgcctctcttacggtacatcttcgtgagggagagggttacaataatccactcacacagctccttttctgcaatggcccatgacgcccttttccacgccaaaaccatgggactccagactgtctttaccgatcactccctattcggctttgccgacgttagctctgtgctgactaacaaactgcttaccgtgtctctatgcgataccaaccacatcatttgtgtttcgtacacctccaaggaaaacactgtactccgcgcagcccttaatccggagattgtgtctgtaataccgaatgccgtggacccaaccgacttcacacccgacccgttccgacgacatgactctataaccatcgtggtagtatcacgcctggtctacaggaagggtatagatctgctgtcaggcatcatccccgagctttgccagaagtacccagatctcaattttattatcgggggcgaaggaccaaaaagaataattttggaagaagtgcgggagagataccagctgcacgacagggtgcgccttctgggggccctggagcacaaagatgtgagaaacgttctggttcagggccatatattcctcaacacaagtcttacagaagccttctgcatggctatcgtggaggcagctagctgcggcctacaggtggtcagtactcgagtgggaggaatccccgaggtgttgcctgagaatctaatcattctctgcgagccgtctgtcaagagcctttgcgaaggactggagaaggctatctttcagttaaaatccggcactttgcccgctcctgagaacattcacaacatcgtgaagacgttttatacctggcgcaacgtcgcggaacgaactgagaaggtgtatgatagagtgtccgtagaggccgtacttcctatggataagcgtctggataggctcatctcccactgtgggccggtgacgggatacatcttcgccctcctggcggtcttcaacttcctgtttctcatcttcctccgctggatgactcccgatagcataatcgatgtggctatcgatgccactggtcccagaggggcgtggactaacaactatagccattctaaacgcggcggtgaaaataacgagatcagtgagacccgg

SEQ ID NO: 250803 - DNA, 1452 bp, synthetic construct
  misc_feature 1..1452: note = Description of Artificial Sequence: Synthetic coding sequence
  source 1..1452: mol_type = other DNA
atggcgtgccgcggtggtgcaggcaatggtcatcgcgcgagcgcaactctgtcgagagtttcccctgggtcactttacacttgcaggacccggacgcataacatttgtatggtatccgactttttctaccctaacatgggaggagtggagtcccacatttatcagctttctcaatgtctgattgagagaggacacaaggtgataattgtgacccatgcatacggcaataggaagggaattcgttacctgacctcaggtcttaaggtgtactacctcccactgaaggtcatgtacaaccagtcgacggcaaccactctctttcactcgctgcctttgctcagatacatttttgtcagggagcgggtcaccattatacattcccactcctcgttctcagccatggcacatgacgcactgtttcatgcaaaaactatggggcttcagaccgtgtttacggatcatagccttttcggtttcgcagatgtgtcatccgtcctgaccaacaaactccttactgtctcactctgtgacaccaaccacattatctgcgtctcatacacctcgaaggaaaacaccgttctgagggctgcactcaaccctgaaattgtgtctgtcatccctaatgctgttgaccctactgattttactccagatccatttcggcgccatgactcaatcaccatcgtcgtggtgagccggcttgtgtaccggaaagggattgatctgctgagtggcattataccggaactttgtcagaagtacccggatcttaacttcataatcggcggagaaggccccaagaggattattctcgaagaagtccgagaaagataccaactgcatgatcgcgtgagacttctgggggcgctggaacataaggatgtgagaaatgtgttggtgcaaggacacattttcctgaatacttccttgaccgaggcattttgcatggctatcgtggaagcagcgtcgtgtggcctccaagtggtcagtactagagtgggagggatcccagaagtgctgcccgagaacttgatcatcctgtgtgagccaagcgtcaagtccctgtgcgaaggactggaaaaggcgatatttcaactgaagtcaggaacccttcccgcacctgagaacattcacaacatagtgaaaacgttctatacttggagaaacgtggccgaacgcactgaaaaagtttacgaccgtgtcagtgttgaagccgtgcttcctatggataagcgtctcgatcgcctcatctctcattgtggtccagtaacgggatacatctttgcccttctggcggtattcaactttctgtttcttatctttctccggtggatgacccccgacagcattatcgatgtggcaattgatgccactgggccaaggggtgcttggaccaacaattactcgcattcgaagcgaggaggagagaataatgaaatttctgagactcgt

SEQ ID NO: 250804 - DNA, 1452 bp, synthetic construct
  misc_feature 1..1452: note = Description of Artificial Sequence: Synthetic coding sequence
  source 1..1452: mol_type = other DNA
atggcctgtagaggcggcgccgggaacggacacagggcatccgcaactctgtcacgagtgtcaccaggttctctgtatacgtgtcgtacccgcacccacaatatctgcatggtttcggatttcttctacccgaacatgggcggtgttgaaagccacatctaccaactgtcacagtgtctcatcgagagaggtcataaggtgattatcgttactcatgcatacggtaacagaaaggggatcaggtaccttacttccggtctgaaggtgtactacctgcctcttaaggtcatgtataaccagagcaccgcaaccacgctgtttcactcgcttccattgctcaggtatatcttcgttagagaacgggtgacgattattcattctcattcatccttttccgcgatggcacatgatgcactttttcacgcgaaaacgatgggactgcaaaccgtctttactgaccattcgctctttggttttgccgacgtgtcctccgtgctgactaacaagctgcttaccgtgtcgctttgcgacaccaaccacattatctgtgtgagttacaccagcaaagaaaacactgtgctccgagcggcgcttaatccagagatagttagcgtaatcccaaacgcagtggatcccactgattttacccccgatccctttaggagacatgacagcatcaccatcgtcgttgtctcaagacttgtgtaccggaaggggattgacctcctcagcggcatcatacctgaactgtgccagaagtaccctgatctgaatttcattatcggcggcgaagggcctaaacgaattatcttggaagaggtgcgtgaaagataccaattgcatgatcgagtgcgtctgctgggcgcgcttgaacataaagacgtccgcaacgtccttgtgcagggccatatctttcttaacacctcgcttaccgaagcattctgtatggctatcgtggaagcagccagctgtggactgcaagtggtatcgactcgcgtgggtggaatccccgaagtgctgccagaaaacttgatcattctttgtgaacccagcgttaagtctctttgcgagggactggaaaaggcaattttccaactgaaaagcgggacccttcccgcccctgagaatattcataacatcgtcaagaccttctacacgtggcggaatgtggcagagagaacggagaaagtgtacgatcgagtgtcggtggaagcagtgctgccaatggataagagattggatagactcatttcacactgcggtcctgtcactgggtacatctttgcactgctcgcggtgtttaactttctgttcctcattttccttcgttggatgactccagactcgatcatcgacgtggcgattgatgccactggtcctcggggagcatggaccaacaattactcccactcgaagcgcggaggggagaacaacgagatttccgaaactaga

SEQ ID NO: 250805 - DNA, 1452 bp, synthetic construct
  misc_feature 1..1452: note = Description of Artificial Sequence: Synthetic coding sequence
  source 1..1452: mol_type = other DNA
atggcatgccgcggaggagccggaaatggacatcgcgcttccgctactctatcccgggtatcacccgggtcactatacacatgtcgcacacgaacacacaacatatgcatggtatctgatttcttttatcccaacatggggggggtggaatcgcatatctaccagctgtcacagtgtctcatcgaacgaggacacaaagttataatagtgactcacgcctacgggaataggaaggggattcggtatttgacatctgggcttaaagtgtattatctccctctgaaagtaatgtacaaccaatctactgctacaacactttttcacagtctccctctgttgagatatatatttgtacgggaacgggtgacaattatccactcacacagttccttctcagctatggcacatgatgcactatttcacgccaaaactatgggacttcagactgtattcacagatcactccctatttgggtttgctgatgtgagttcagtgctaacaaacaagctcttaacagtctcactctgtgatacaaatcacattatatgtgtgtcctatacaagtaaagaaaatactgtcttgagggctgctctcaaccctgaaatagtctcagtgatccctaatgcggtggatcctacagatttcacacccgatccctttcgaaggcatgattcaataactatcgttgtggtctcccgacttgtataccgaaaaggaatagatctgctgtcaggaatcatacctgagctatgccagaaatatcccgatcttaactttataattggaggagaaggacctaaaaggatcatacttgaggaagtacgggaacgatatcagctccacgatcgcgtgagactcctgggggcccttgagcacaaagatgtgaggaatgtactagtccaggggcatatatttctaaacacatccctaactgaagccttctgtatggctatcgtcgaagcagcaagttgcgggctacaggtggtgtccactcgagtagggggaatccctgaagtactgcctgaaaatttgattatactgtgtgaaccgtcagtgaagtctttatgcgaagggctcgaaaaggccatcttccagctcaagtccgggacactacctgctcccgagaacatccacaatatcgtaaaaacattttacacatggcggaatgtggccgagcggacagaaaaagtgtatgatcgagtctcagtggaagcagtgcttcccatggataaacgattagatcggctgatcagtcactgtggacctgtcactggatacattttcgccctcttagcagtcttcaactttctttttctaattttcttaagatggatgactcctgattcaatcatcgacgtggctatagatgcaacagggccccggggagcttggacaaataactacagtcattcgaaacgaggaggagaaaacaatgaaatttcggaaactcga

SEQ ID NO: 250806 - DNA, 1452 bp, synthetic construct
  misc_feature 1..1452: note = Description of Artificial Sequence: Synthetic coding sequence
  source 1..1452: mol_type = other DNA
atggcttgccgcggcggtgcaggtaatggtcatagagcaagcgcaaccctgagccgcgtctcccccggctctctgtacacctgcagaactcgcacccataacatttgtatggtatctgatttcttctaccccaacatgggaggagtggaatcccatatctatcaactgagccagtgccttatcgaaagaggccataaggtaatcattgtgactcacgcctacggaaatcgcaagggtatcagatatctcacgagcggactcaaggtttactacctgccgctgaaagtcatgtacaaccaatctacggccactaccctgtttcactctctccctctcctgcgctacatctttgtccgcgagcgcgtcacaattatccattctcactcttcattctctgccatggcccacgatgccttgttccacgccaagaccatgggactgcaaacagtcttcaccgatcacagcctttttggcttcgccgatgtctcctctgtgctcacaaacaagctgctcaccgtcagcctgtgcgatactaaccacatcatctgcgtgagttatacaagtaaggaaaacaccgtcctccgcgccgccctgaaccccgagatcgtctctgtgatccctaacgcggtcgatcccaccgacttcaccccggacccattcagaaggcatgattcaatcaccatagtggtcgtgagcagactggtgtacaggaagggcatagatctgttgagcggaattatcccagaactgtgccagaagtatcctgaccttaactttatcattggaggcgaaggtcctaagcgcattatcctggaagaggtccgcgaacgctaccaactccacgacagggtcagacttcttggtgctttggagcataaagatgtgcgcaacgtgcttgtccagggacatatcttcctcaacacaagcctgactgaggccttctgtatggcgatcgttgaagctgcatcctgcggattgcaagtggtgtctacaagagtaggcggtatacctgaggtactgcccgaaaatctgattatactctgcgagccctccgtgaagtctttgtgcgaaggtctcgaaaaggctatttttcagctgaaaagcggaaccctgcctgcacccgaaaatattcataacatagttaagacattctacacttggaggaacgttgccgaaagaactgaaaaagtgtacgatcgcgtctcagttgaagcagtgttgcctatggacaagagattggatcgcttgatctcccattgcggacctgtgaccggatacatattcgcgcttctcgccgttttcaacttcctcttcctgattttcctgaggtggatgactccggattcaatcatagatgtagcgatcgacgccactggtccaaggggagcatggactaacaactattctcatagtaagagaggaggtgaaaacaacgaaatctccgagacccgc

SEQ ID NO: 250807 - DNA, 1452 bp, synthetic construct
  misc_feature 1..1452: note = Description of Artificial Sequence: Synthetic coding sequence
  source 1..1452: mol_type = other DNA
atggcatgtaggggcggcgctggcaatggccacagagcttccgcgacgttatctcgtgtctctcccgggtctctgtacacttgccgcacccggacacataacatctgcatggtgtcagacttcttctacccgaacatgggcggagtggagagccatatctaccaactcagtcaatgccttattgagagaggacacaaggttataattgtgacccatgcatacggaaacaggaaaggaatcagatacttgacctccgggctcaaggtgtactatctgcctctgaaagtcatgtacaaccagagcacagccacgacactgtttcacagcttacccctactcaggtacatcttcgtgcgcgagcgagtgacgatcatccactcccattcaagtttttcggccatggcgcacgatgctctgttccacgcaaaaacaatgggactgcaaaccgtctttactgaccactcactctttggattcgctgacgtgtcaagcgtacttacaaacaagctgctgactgtgtcattgtgtgatactaatcatatcatatgcgtaagctacacctctaaagagaatacggtcctccgagccgccctgaatcctgagattgtgagcgtcatcccaaacgctgtggatccgacggattttacgcctgacccgtttcggagacatgactccataacaatcgtggttgtgtcaagactggtctatcggaaaggcatagacctcctctctggaatcatcccggaactatgccagaagtatcccgatttgaactttataattggaggagagggcccgaaacggatcattctggaggaggtgagagagaggtaccaactgcatgacagagtgcgtctgctcggagccctggagcacaaagatgtgcgaaacgtgctagtgcagggccatatcttcctgaacaccagcttaacagaggccttttgcatggccatagtggaggccgcatcgtgtgggcttcaggtggtgagcactagggtagggggtatccctgaagtgttgcctgagaacctgattatactgtgcgaaccatcagtgaagtcactgtgcgaaggtctggagaaagcaatcttccaactcaaatcaggcactttgccggccccagagaacatccacaacatcgtaaaaaccttctatacctggagaaacgtcgcagagaggacagaaaaggtgtatgaccgcgtctctgtggaagctgtgttaccaatggataaaagactggaccggcttatcagtcactgcggccctgtgaccggctatatatttgccctgctggccgtgttcaatttcttgttcctcattttcctgagatggatgaccccagattcaatcatcgatgtggccattgatgctaccggacctcgaggtgcttggacaaacaactattcccattccaagaggggcggcgagaacaacgaaatcagtgagacacgg

SEQ ID NO: 250808 - DNA, 1452 bp, synthetic construct
  misc_feature 1..1452: note = Description of Artificial Sequence: Synthetic coding sequence
  source 1..1452: mol_type = other DNA
atggcatgccgcggaggcgcaggaaacggtcaccgcgcatctgctacgctgagtcgggtcagcccgggaagcctgtatacctgcagaactagaacccataacatctgtatggtgtcagattttttctatccaaacatgggaggtgttgagagtcatatctaccagctgtcccaatgcctcattgaaaggggacacaaggtgatcattgtaacccacgcttatggaaaccgaaaagggatccgttaccttaccagcgggttgaaagtgtactacctgccattgaaagttatgtacaatcagtcgacagctacaaccctttttcatagccttcccctgttgaggtatattttcgttagagaaagggtgactatcattcacagccacagcagcttcagcgcaatggctcacgacgccttgtttcacgccaagacgatgggacttcagacagtgttcaccgaccactcactgttcggcttcgccgatgtgagtagcgtcttgaccaacaaacttctcaccgtttcactctgcgacaccaaccacattatttgcgtttcttacactagcaaggaaaataccgtactgcgcgccgcccttaacccagagatcgtatctgtcatccccaacgcagtggatcctaccgattttactccggatccttttaggaggcatgatagcatcactatcgtggtagttagccgcctcgtgtataggaagggcatcgaccttctttcaggaattatccccgagctctgccagaaatatccagatctgaacttcattatcggcggcgagggccctaagaggatcattctggaggaggtgagagagaggtaccaacttcatgatagagtgagactgctgggggccttggagcacaaggatgtgcgcaacgtattggtacagggccacatctttctcaacacctcattgaccgaagctttctgcatggctatcgtggaggcagcgagctgtggacttcaggtcgtttcaacgcgggtggggggcatccccgaggtgttaccagagaaccttatcatcctttgcgaaccaagcgttaaaagtctgtgcgaagggctcgagaaggccatctttcagctgaagtctggcaccttgccagcacctgagaatatacacaacatcgtaaaaacattctacacctggcggaacgtggctgagcggacagagaaagtttacgacagggtctccgttgaagcagtacttcccatggataagcggttggacagacttattagtcactgcggaccagtgaccggctacatctttgcacttctggctgtcttcaattttctgttcctgatattcctgcggtggatgacccccgactcaatcatagatgtggctatcgacgcaacaggtcctagaggagcatggacaaacaactattctcatagcaagcggggaggggaaaataatgagatctcagagaccaga

SEQ ID NO: 250809 - DNA, 1452 bp, synthetic construct
  misc_feature 1..1452: note = Description of Artificial Sequence: Synthetic coding sequence
  source 1..1452: mol_type = other DNA
atggcctgccgtggcggtgcaggtaatggacaccgcgcgtcagcaaccctcagcagggtatctcctggctccttatatacatgcaggaccaggactcacaatatctgcatggtatccgattttttctaccctaacatggggggcgtggaatcccatatctaccagctgtcccagtgtctgatcgagagaggccataaagtgatcattgtgacccacgcttatgggaaccgaaaaggcattagatacctcacatccggcttgaaggtctactacctgccgcttaaggtgatgtacaatcagtccaccgccactactctgtttcattcgctacctctgctccgttatatcttcgtccgggagagggtaaccatcatccactctcacagctcattttctgcaatggcccacgatgctttattccacgcaaagaccatgggtctccaaaccgtatttacagatcacagcctcttcggattcgcggatgtatcatccgttcttaccaataagttactgaccgtatccctgtgcgacactaatcacatcatatgtgtctcatacacctccaaagagaacaccgtactccgcgccgccctgaaccccgagattgtcagcgtaatccccaatgcggtggatcccaccgacttcacccccgatccctttaggcggcatgacagcatcacgattgtggttgtgagccgcctggtgtataggaaaggcatcgatctgttaagcggaatcatccccgagctgtgtcagaagtaccccgacctaaacttcatcataggtggcgaggggccaaaacggataattttagaagaagttagggaaagataccagctccatgaccgggtgcggttactgggagctctagaacataaagacgtccggaacgtgctcgtgcagggacacatcttcctgaacacatcgctgactgaggctttttgcatggccatagtagaggccgccagctgcggtctccaggtggtgtctaccagggtaggcggaattccagaagtgctccctgagaatcttattattctgtgtgagccaagcgtgaagagcctgtgtgaggggctcgagaaggcaatctttcagctaaagtctggtacactgccagctccagagaacatacacaatatcgtaaagaccttctatacgtggagaaacgtggctgaacggactgaaaaggtatatgatagagtatcagtagaggcagtcctgcccatggataaacggcttgaccggctgatatcccactgcggaccagtcactggttatatattcgcactgttggccgtgtttaactttctgtttctaatctttttgagatggatgactcctgatagcattatcgatgtggctatcgatgctaccgggcctcgcggcgcgtggaccaacaattacagtcactctaagcggggaggggaaaataatgaaattagcgagaccaga

SEQ ID NO: 250810 - DNA, 2541 bp, synthetic construct
  misc_feature 1..2541: note = Description of Artificial Sequence: Synthetic coding sequence
  source 1..2541: mol_type = other DNA
atggcaaagccactcactgaccaggagaagagacgtcagatctcgatccgaggtattgtgggggtggaaaacgtcgctgaactgaagaagagctttaatcgacatctgcactttaccctggtgaaggaccggaacgtggcaaccactcgggattactatttcgcccttgctcataccgtcagggaccatctggtcggtcgctggattcgcacccaacaacactactatgataaatgcccaaaaagggtgtactacctgagccttgaattctacatgggacgtactctccaaaatactatgattaacctgggtctgcagaacgcctgcgatgaagcaatttaccagctgggtctggatattgaagaactcgaagaaatcgaagaggacgccggacttggtaatggtggtctgggaaggcttgcagcatgttttttggattcgatggccactcttggactggctgcatacggttacggaatccgttacgagtatgggattttcaaccagaaaatacgggatggctggcaagtcgaggaggcagatgattggcttagatacggcaatccttgggagaagagtagaccggaattcatgctccccgtgcacttttacggtaaggtggaacataccaataccgggaccaagtggattgacacccaggtcgttcttgccttgccatacgatactccggttccaggatacatgaacaatactgtcaatacgatgcgactgtggtcggcacgcgccccaaatgatttcaaccttagggacttcaacgttggagactatatccaagcagtcctggaccgaaaccttgccgagaacatttcacgagtcctgtaccctaatgacaacttcttcgagggaaaggaacttcggttgaagcaagaatactttgtagtcgctgcgactctgcaagacataattcgcaggttcaaggcttcaaagtttggatcgaccagaggagcaggaactgtgtttgatgcatttccagaccaagtggcaattcagctgaacgacacgcatcctgcattggccatacctgagcttatgagaatctttgtcgatattgaaaagctcccatggtccaaagcatgggaacttacccaaaaaacttttgcatacactaatcataccgtgctgcccgaagcactcgaaagatggcctgtggatcttgtggaaaaacttcttccaaggcatctcgaaatcatatacgagataaaccaaaagcatctcgaccgtattgtcgctcttttccccaaagatgtggatagactccgtcggatgtcactcattgaggaagagggaagcaagagaattaacatggcacatctttgcatcgttggatcccatgcagtcaacggggtggcaaagatccactcagacattgttaagacgaaggtgttcaaggacttctcggagttggagcctgataagtttcagaacaaaacgaacggaatcacccctaggcggtggctcctcctctgtaatccgggacttgcagagctgattgcagaaaagatcggagaagattacgtgaaggatctgagccaactgaccaagctgcattccttccttggtgacgatgtttttcttcgggagctcgcaaaggtgaaacaggaaaacaagctgaagttttcccaatttctcgaaactgaatacaaagtgaagattaatccctcgtctatgtttgatgtacaagtaaaaagaattcacgagtacaagaggcaattgctcaattgtctgcacgtcattacgatgtacaatcgaatcaagaaggatcccaagaaactctttgtgcctcgtaccgtgatcattggcggtaaggcggccccgggctaccacatggccaaaatgatcatcaagctgatcacctcggtggccgatgtggtgaacaacgaccctatggtgggaagcaaacttaaggtgatctttctggagaactaccgagtgtccctggcagagaaggtgattcctgcgacggatctgtcagagcaaatctcaactgcagggactgaagcatcgggtaccggaaacatgaagtttatgcttaacggcgctctgacgataggtaccatggatggagcaaatgtggagatggcggaagaagccggggaagagaacctgttcatttttggaatgcgcatagatgacgttgccgccttggataagaagggatatgaagcaaaagaatactacgaagccctgccagaacttaagctggtgattgatcagatcgataacggctttttcagcccaaagcaacctgacttgtttaaagacatcattaacatgctgttttaccacgacaggtttaaagtgtttgcagattacgaagcatacgtcaaatgtcaggataaggtgagccagctgtacatgaatcctaaggcatggaatactatggtccttaagaacatcgcagcgtcgggcaaattctcgtctgatcgtaccatcaaagaatacgcgcagaacatctggaacgtggaaccttccgacttgaagatttcccttagcaatgaatctaacaaggtcaacggaaac

SEQ ID NO: 250811 - DNA, 2541 bp, synthetic construct
  misc_feature 1..2541: note = Description of Artificial Sequence: Synthetic coding sequence
  source 1..2541: mol_type = other DNA
atggccaaaccattgactgaccaggagaagagacgtcaaatcagcatccgcggaattgtgggtgtggagaatgtggcagagctcaagaagagttttaaccggcaccttcactttaccctggtgaaggacaggaacgtagctacaacccgtgactactacttcgcgctagcccatacagttcgagaccacctggtgggccggtggatccgtacgcaacaacattattacgataagtgtccaaagcgcgtctattacctgagccttgagttctacatgggcagaacgctccagaacacaatgattaacctcggactgcaaaacgcttgtgatgaagccatctaccagttaggcctggatattgaagaactggaggagatcgaggaagatgcgggcctggggaacggcggactgggtcgcctcgcggcctgttttctagattcgatggcgactctgggactagccgcatatggttatggcatccgatatgagtacggtattttcaaccaaaaaatcagagacggatggcaggtcgaggaggcagatgattggctcaggtatggcaatccatgggagaagagccgcccagagttcatgctccctgtgcacttttatggcaaggttgagcacaccaacacaggcacgaagtggatagacactcaagtggtgttggccttgccgtatgatactccggtgccgggttacatgaataatacggtaaacacgatgcgactgtggagcgcgcgcgccccaaatgacttcaatctgcgtgatttcaacgtcggtgattatattcaagcagtcctggaccgcaatctggcggagaacatctcccgcgtgctgtacccaaatgataatttcttcgagggcaaggagttgcgcctgaagcaggagtacttcgtggtggcagctaccctgcaagatatcattagacgtttcaaggcttccaagttcggctcgacacgaggagcgggaacggtattcgacgcgttcccggatcaagtcgccatccagttgaacgatacccatcccgccctggcaatccccgagctcatgcggatattcgtagatatcgaaaagctgccgtggtcaaaggcctgggagctgacccagaaaacctttgcctataccaatcacacagttctccccgaggccctcgaacggtggccagtagatcttgtcgaaaagctgcttccccgccacctggagattatatacgaaattaatcaaaaacacctggaccggatcgtggccctgtttcccaaggatgtcgatcgtctgagacgtatgagcctgatcgaggaggagggctcgaagcgaatcaacatggcgcatctttgtatcgtcggctcccacgcggtaaacggcgtggccaagatacactccgacatcgtgaagacaaaggtgttcaaggatttctcggaattggaaccggataaattccagaataagacgaacggtattacaccgcgccgctggctgctgctctgcaacccaggactggctgaattaatcgcagagaagatcggagaggattacgtcaaagatctgtcacaactgacgaagctccactcgtttctaggcgacgatgtgtttctgcgagagctggccaaggtcaaacaggagaataagctcaaattctctcagttcttggagacagagtacaaagtgaaaattaacccctcatcaatgtttgatgttcaagtgaagcgtatacacgagtacaagcgccagctgctaaattgcctacacgtgataacgatgtacaatcggatcaagaaggatcccaagaagttgttcgtgccccgtaccgttatcatcggcggcaaggcggctcccggttaccacatggctaagatgattattaaactaattacctctgttgccgatgttgtgaacaacgacccgatggtgggaagtaagcttaaagtgattttcttggagaactacagggtgtccctggccgaaaaggtgattcccgcgacagacttgagtgagcaaataagcaccgcaggcacggaggcatcgggcaccggcaatatgaagttcatgttgaatggcgcgctgaccatcggcacgatggatggcgccaacgtagagatggccgaagaagccggcgaggagaacctgttcatctttggcatgcgtatcgacgacgtggcggcactggataaaaagggctacgaagccaaagagtactatgaggcgttgcctgaactgaagctggtcattgaccagatcgataatggtttcttctcgcccaagcagcccgacctcttcaaggatatcatcaacatgctgttctaccatgatcggtttaaagtgttcgccgattacgaagcctacgtaaagtgccaggataaggtaagccagttgtatatgaacccaaaggcatggaataccatggtcctgaagaatatagctgcaagcgggaaattcagcagtgatcgcacaatcaaggagtatgcccagaatatatggaacgtggaaccaagcgacctgaaaatcagcctttcaaatgagtccaataaggttaacggtaat

SEQ ID NO: 250812 - DNA, 2541 bp, synthetic construct
  misc_feature 1..2541: note = Description of Artificial Sequence: Synthetic coding sequence
  source 1..2541: mol_type = other DNA
atggctaaacccctcactgaccaggaaaagcgccgccagatttcgatccgtgggatcgtcggcgtggagaatgtggcagaactcaagaaatcgttcaaccggcatctgcatttcactctggtgaaggaccggaacgttgcaactaccagggactactattttgcactggcgcatactgtccgcgaccacttggtgggcagatggatccggacccagcagcattactacgacaagtgtcctaagcgtgtgtactacctgtcacttgagttctatatgggacggactctgcaaaacaccatgattaaccttggccttcagaacgcatgtgatgaagctatctaccaactggggctggatatcgaagagctcgaggaaattgaggaggatgcgggacttggaaacggtgggctgggacgcctggcagcctgcttcttggactcaatggcgactctcggactggctgcttacggttacggaatcaggtacgaatacggcatcttcaaccagaagatccgggatggttggcaggtggaagaagcagatgactggcttcggtacgggaatccttgggagaagtcccggccggaattcatgctcccggtccatttctatgggaaggtcgaacacaccaataccggcactaagtggattgacacccaggtggtgcttgccctgccgtacgacaccccggtccccggatacatgaacaacactgttaataccatgaggttgtggtctgcgcgcgcgcctaacgactttaaccttcgcgacttcaacgttggggattacatccaggccgtcctggatcgcaacctggctgagaatatctcacgcgtgctgtacccgaatgacaacttcttcgaaggaaaggagctgagactcaaacaagaatactttgtggtggcggccaccctccaggatatcatcagacgcttcaaggccagcaagttcggaagcacccgaggtgccggaaccgtgtttgacgccttccctgatcaagtggccatccagctcaatgatactcaccccgcgcttgcaatcccagagctgatgagaatctttgtggatatcgaaaagctcccatggtccaaagcatgggaactgacccagaaaacttttgcttacactaaccataccgttctgccggaagcccttgagcggtggccggtagacctggtcgagaagctcctcccacggcacctcgaaatcatctacgagattaatcagaaacaccttgaccggattgtcgccctgttccctaaagatgtggacaggcttagacgcatgtcccttattgaagaggagggatcaaaacggatcaacatggcgcacctgtgcattgtgggatcacatgccgtgaatggagtggccaaaattcattccgacatcgtgaaaaccaaggtgtttaaggatttctctgaactcgagccagacaagtttcaaaacaagactaatggaattacccctcgccgctggctgctgctgtgtaatccaggattggcagaactgatagcggaaaagatcggtgaggactacgttaaggatctgagccaattgaccaagctgcactcgttcctcggagatgatgtattcttgcgggaactggctaaggtgaagcaagagaacaagctcaagttttcccagttcttggagactgaatacaaagtcaaaatcaatcccagctcgatgtttgacgtgcaggtgaagcgcatacatgaatacaaacggcaactgctcaactgcctgcacgtgatcacgatgtacaaccggatcaaaaaggaccccaagaagctcttcgtgccgcggacggtgatcatcggcggcaaggccgccccgggataccatatggcgaagatgatcatcaagttgatcacctccgtggccgacgtggtgaataacgacccaatggtcggctcgaaactgaaagttatcttcctcgaaaactatcgggtgtccctggccgagaaggtgatcccggcgactgaccttagcgagcaaataagcaccgcgggaaccgaggcgtcgggaaccggcaacatgaagtttatgctgaacggcgccctcactatcggaactatggacggagcaaatgttgaaatggcagaggaagcgggcgaagagaacctgtttatcttcggaatgcgaatcgatgacgtggcggccctcgataagaagggctacgaagcgaaggagtactacgaggccctcccagagctcaagctggtgatcgatcaaatcgacaatggattcttcagccccaagcagccagacctctttaaggatatcattaacatgctcttctatcatgaccgctttaaagtgttcgccgattacgaggcatacgtgaagtgccaagataaggtgtcccaattgtacatgaacccgaaggcctggaacaccatggtcctgaagaacatcgccgcgtcgggaaagttctcatccgatcgcaccatcaaggaatacgcccagaacatctggaacgtggaaccaagcgatctcaaaatctcgctgtccaacgaaagcaataaggtgaatggaaat

SEQ ID NO: 250813 - DNA, 2541 bp, synthetic construct
  misc_feature 1..2541: note = Description of Artificial Sequence: Synthetic coding sequence
  source 1..2541: mol_type = other DNA
atggcaaagccgcttacggaccaggaaaagagacgtcagatttccattagaggtatcgtgggcgtggagaacgtggcggagctgaagaagagcttcaacagacatctccatttcactcttgtgaaagacagaaacgtggccactaccagggattactactttgcactggcacatacggtcagggatcacctggtgggccgctggattagaactcaacaacattactacgataaatgtcctaaaagagtgtactaccttagccttgagttttacatgggacgcactctgcagaacaccatgatcaatcttggtctgcagaacgcatgcgacgaggcaatttaccaattgggcctggatattgaggaactggaggaaatcgaggaggatgcaggactgggaaatggagggctgggaaggttggctgcctgttttcttgattcaatggccaccctgggacttgcagcctacggatacggaatcagatacgagtacggtatattcaaccagaaaatacgggacggctggcaagtggaggaggcagacgattggctgcgatacggcaatccctgggagaagagcagaccagagttcatgcttccagtgcacttttatgggaaagtggagcatactaacaccgggaccaagtggatcgacacccaagtggtgctcgcactcccctacgataccccagtgccaggatacatgaataacactgtgaacactatgcgtctctggtcagctcgcgcacccaatgatttcaatttgcgtgactttaacgtcggcgattacatccaagcagtccttgaccgcaatcttgcagaaaacatatcgcgagtgctgtacccaaacgataacttctttgaggggaaggaattgagactgaagcaggagtactttgtcgtcgcagccactctccaggacattattcggagattcaaggcgtctaaattcgggtccacgcggggagcaggcaccgtattcgatgccttcccagaccaggtcgcgattcaacttaacgacactcatcctgcacttgcaatacctgaacttatgcgcatttttgtggacattgaaaagctcccctggtccaaggcgtgggaactgacccagaaaacttttgcatatactaaccatactgtgttgcctgaagcactggaaaggtggcccgttgatttggttgaaaagctgctcccaagacatttggagataatctatgaaatcaaccagaagcacctggatcggattgtggctctctttccaaaggatgtggatcggctgaggcggatgagccttatcgaagaggaagggtcaaagcggattaacatggctcatttgtgtatcgtgggctcgcacgcagtcaacggtgtagctaagattcactcggatatcgtgaaaactaaggtgttcaaagatttctccgaactcgagccggataagtttcaaaacaagactaacggcattacccctagacggtggctgctcctgtgtaacccaggccttgccgaactgattgcggaaaagattggagaagattacgtgaaagacctgtcccaactgaccaagctgcattccttcctcggagatgatgttttccttagagaacttgcgaaagtgaaacaagagaacaagctgaaattctcgcaattcttggaaaccgagtataaggtgaagattaaccccagctccatgttcgacgtgcaagtgaagcggattcatgagtacaaaagacaactgctgaattgccttcatgtgattaccatgtataatcggatcaaaaaggatccaaagaaactgtttgtgccccgcactgttatcataggtggtaaggcagcacccggttaccatatggcgaagatgattatcaaactcattaccagcgttgcggacgtggtcaataatgaccctatggtcggaagcaagctgaaggtgattttcctggaaaactacagggtgtcgctcgcggagaaagtgataccagctactgatcttagcgagcaaatttcaaccgcaggaaccgaggcaagcggaactgggaatatgaagtttatgctgaacggtgcactcactattggtactatggacggtgccaacgtcgaaatggcagaggaggcaggcgaagaaaatcttttcatctttggaatgcgcattgatgatgtggcagcactggataagaagggatacgaggcaaaggaatactacgaagcactcccagaacttaaacttgtgatcgatcaaattgataatgggttcttttcccctaagcaacctgatctcttcaaggatatcataaacatgctcttttaccatgataggtttaaggtctttgcggattacgaggcctacgtcaagtgtcaggataaagtctcacaactttacatgaatccaaaagcatggaacaccatggtgctgaaaaacattgccgcatcagggaagttttcgtccgatcgaaccattaaagaatacgcacaaaacatttggaatgtggaaccctcagatctcaaaatctctcttagcaatgaatccaataaggtcaacggtaat

SEQ ID NO: 250814 - DNA, 2541 bp, synthetic construct
  misc_feature 1..2541: note = Description of Artificial Sequence: Synthetic coding sequence
  source 1..2541: mol_type = other DNA
atggctaaaccactgaccgaccaggagaagagaaggcagatttccatcagaggaattgtgggcgtagaaaatgtggcagaactaaagaaatcctttaacaggcacctgcattttaccctggtcaaggacagaaatgtggctaccacccgggactattactttgccctcgcacacacggttcgcgatcatcttgtcgggagatggatccgaacccagcagcattattacgataaatgccctaaacgcgtctactatctgagtttggagttctatatgggacggacactccagaataccatgatcaatctgggactacagaacgcctgcgacgaggctatctatcagctggggcttgacatcgaagagctggaagagattgaggaggatgctggtctgggtaacggcggcttaggccgcttggccgcatgttttctggactctatggctactctggggctcgctgcatacgggtacggcatcagatatgaatatggcatttttaatcagaagatacgagatggttggcaggtggaggaggctgacgattggctgcgttacggaaacccctgggaaaagtcacgcccagagttcatgttgccagtccacttctacggcaaggtcgagcatactaatacgggaactaagtggattgatactcaggtcgtgttggccctgccctacgatacccccgtgccaggctacatgaataacactgtgaataccatgcggctttggtcagctcgtgccccgaacgatttcaatctgcgcgactttaacgtcggcgattatatccaagccgtactggatagaaacctcgcagagaacatctctcgcgtattgtatcccaacgataacttcttcgaagggaaggagctgcgtctgaagcaagaatacttcgtcgtcgccgcaactctgcaggatataatccgcagattcaaggcatctaaatttggcagcacacgtggggctgggacagtcttcgacgcctttccagaccaggttgcaattcagttaaacgacacacaccctgctcttgccatcccggagctgatgaggattttcgttgatattgaaaagcttccatggagcaaggcctgggagcttactcagaaaaccttcgcttacactaaccataccgtactcccagaggccctcgagagatggcctgtggacttggttgaaaagcttttgcccagacacctggaaattatttacgaaattaaccagaaacatctggaccgtatcgtggccctgtttcctaaggacgttgaccggttgcggcgcatgagcctcattgaggaagagggaagtaaacgcattaatatggcacacttgtgcatcgtggggagtcacgccgtgaacggcgtagccaaaattcatagtgacattgtaaagaccaaggtgtttaaagacttctctgaactggaacctgacaaattccagaataagacgaacggaatcacgccccggagatggctgcttttgtgcaacccagggctggccgagctcattgccgagaagattggtgaagattacgtgaaagatttgtctcagctcaccaagctgcactcttttcttggggacgatgtttttctgcgggaattagccaaggtcaagcaggagaacaaacttaaattttcacagttcctcgagacggaatataaggtcaagataaatcctagtagtatgttcgatgtgcaggtgaagaggattcacgagtacaaacggcagctgctcaactgcttgcacgtaattactatgtataaccggattaaaaaggatcccaagaagctattcgtgccacgaaccgtgataatcggtggtaaagcggccccgggctatcacatggccaaaatgataattaaactgataaccagcgtagccgatgttgttaacaacgaccctatggtaggcagtaagctgaaagtgattttcctggagaattatagggtgtctttggctgaaaaagtgatccccgcgaccgatctgagcgaacagatctctaccgctggcacagaggctagtgggactgggaacatgaagtttatgcttaatggcgcgcttacaataggtaccatggacggtgcgaacgttgagatggccgaagaagctggggaggagaatttgtttatttttgggatgcgaatcgacgatgtcgcagcgctagataagaagggctacgaggccaaagagtattatgaggccctaccggaactgaagctcgtgatcgaccagatcgataacggtttcttttctcctaaacagcccgatctgttcaaagacatcattaacatgctgttctatcacgaccgctttaaggtatttgcagactacgaggcttacgtcaagtgccaggacaaggtgagtcagctgtatatgaatcccaaggcctggaacacgatggtactgaagaacatagcggccagtggtaagttcagcagcgatcggaccatcaaagaatatgcccaaaatatctggaacgtggagccatcggacctgaaaatttctctgtcaaatgagtccaataaggtcaatggtaac

SEQ ID NO: 250815 - DNA, 2541 bp, synthetic construct
  misc_feature 1..2541: note = Description of Artificial Sequence: Synthetic coding sequence
  source 1..2541: mol_type = other DNA
atggcgaagcctctgactgatcaggaaaaacggcgtcaaatctccatccgcggaatcgtgggagtagagaacgtggccgaactcaagaagagtttcaaccgccatcttcatttcaccctggttaaggaccgcaacgtggccaccacgcgagactactacttcgcattggcgcacaccgtgcgggaccatctggtcgggaggtggattcggacccagcaacattactacgacaaatgccccaaaagagtctactacctctcgctcgagttctacatggggagaaccctgcagaataccatgataaacttgggtctgcagaatgcatgtgacgaagctatttaccaactcggactcgacatcgaagaacttgaggagatcgaggaggatgcaggactgggaaatgggggactgggacggctggccgcctgttttctggactcaatggcgacccttggattggccgcctatggatacggaatccgttacgaatacggaattttcaatcagaaaatcagagacggttggcaggtcgaggaagccgacgattggctgcggtacggaaacccatgggagaagtcgcggccagaattcatgcttccagtccatttctacggaaaggtggaacacactaacacgggcaccaagtggatcgatacgcaagtggtgctggctctcccgtacgacaccccggtcccgggttacatgaacaacactgtcaataccatgagactttggtcagcgcgagcgccaaatgactttaacctccgcgatttcaatgtcggcgactatatccaagccgtgctcgatagaaatttggccgagaatatctcccgtgtgctctacccgaatgacaatttcttcgaaggtaaagagctgaggctgaagcaggagtactttgtggttgccgcgactctgcaggacattattcggcggtttaaggcctcgaagttcggctccactcgcggagccgggactgtgttcgatgccttcccggatcaagtggcaatccagctcaacgacactcacccggctctggccatcccagaactgatgcggatcttcgtggatatcgagaaactcccttggagcaaggcctgggaactgacgcaaaagacctttgcctacaccaaccacactgtcctcccggaagcattggagcgatggcccgtggatctggtggagaagctgctgccgagacatctggaaatcatctatgaaatcaatcaaaagcacctcgacagaatcgtcgctctgttcccaaaggatgtggatagattgcgcagaatgtcgctgattgaggaagagggctccaagcggataaacatggcccacctgtgcattgttggaagccacgcggtcaatggggtggctaagatccacagcgatatcgtcaaaaccaaggtctttaaggacttttcggagctcgagcctgataagttccagaataagaccaacggtataactccgcgccggtggctcttgctgtgcaaccccggcctggcggaactgatcgctgagaagatcggagaggactacgtcaaggacctgagtcagctcacgaagctccactcattcctcggagacgacgttttccttcgggagctggccaaggtgaaacaggaaaacaaactgaaattctcgcagttcctcgaaactgagtataaggtcaagattaacccatcctccatgtttgatgtgcaggtgaaaaggatccatgagtacaagcgccagctgctcaactgcttgcacgtcatcactatgtacaataggatcaagaaagatcctaaaaagctgttcgtgcctcggaccgtgatcattgggggaaaggccgctccgggataccatatggcaaagatgatcatcaaactgatcacgagcgtcgctgacgtcgttaacaacgacccaatggtgggttccaagctcaaggtgatcttccttgaaaactaccgcgtgtcactggcagagaaggtaatcccggcgaccgacctcagcgagcagatctcgactgctggaactgaagcctcaggcactggcaacatgaaattcatgctgaacggtgccctgaccattggaactatggatggggcgaacgtggaaatggctgaagaagccggagaagaaaacctgttcatcttcggaatgagaatcgacgatgtggcggcgttggacaaaaagggttacgaagccaaagagtactacgaggccctccctgaactcaagctggtgattgatcagatcgataatggtttcttttccccaaaacaaccggacctgttcaaggacatcattaacatgttgttttatcacgaccgctttaaagtgttcgctgactacgaggcgtacgtgaaatgccaggataaagtcagccaactgtacatgaaccctaaggcatggaataccatggtgcttaagaatatcgcggcgtccggaaagttctcgagcgaccggactataaaggagtacgcccagaacatctggaacgtggaaccctcagacttgaagatcagcctgtcaaacgaatccaacaaggtcaatggaaac

SEQ ID NO: 250816 - DNA, 2541 bp, synthetic construct
  misc_feature 1..2541: note = Description of Artificial Sequence: Synthetic coding sequence
  source 1..2541: mol_type = other DNA
atggccaaacctttaaccgaccaggagaagcggcggcaaatcagcatcagaggaattgtgggggttgagaacgtggcggagctgaaaaaatcctttaacagacacctacacttcactcttgttaaagaccgaaatgtagccactacccgagactattattttgccctggcccacaccgtgcgggaccacttggtgggacggtggattagaactcagcaacattattatgataagtgtccaaagcgagtgtactatctgagcttggagttctatatggggcgtacgttacagaatacaatgatcaatctggggctgcaaaatgcctgtgatgaagcaatctatcagttgggcctagacatagaggaacttgaagaaattgaggaggatgccgggcttgggaatgggggtctgggacggctcgcagcgtgcttcttggattccatggccacactgggcctagccgcttatggctatgggatccgctacgagtatgggatttttaatcaaaagatccgcgacgggtggcaggtggaggaggctgacgactggttgagatatgggaacccctgggagaagtctcgtccagaattcatgttgcctgtacacttctacggcaaggtcgaacatactaacacaggaaccaaatggatcgacactcaggtggtgctggcactgccatacgacacccccgtaccaggctacatgaacaacaccgtgaacactatgcgcctgtggagcgctcgggccccgaatgattttaacctcagagattttaacgtgggggattatatacaggctgtccttgacaggaacctggccgaaaatatttcccgcgtgttatatcccaacgacaacttctttgagggcaaggaactaaggctcaagcaagaatattttgtcgtggcagcaacgctccaggatatcatcagacgctttaaagcaagtaagttcgggtctacccgcggcgccgggacagtgttcgacgctttcccagaccaagtggctattcaacttaacgatacccatccagcccttgcaattcctgagctcatgcggatttttgtagatattgagaagctaccttggtctaaggcttgggagctgactcagaaaacctttgcctataccaatcatacagtgctgcctgaagccctcgaaaggtggccggtcgatctcgtggagaagctcctacctcgacatctggaaattatctatgagataaatcagaagcatctggatcggatcgtggcactgtttcctaaggatgtggatcgcctcaggcggatgtcattaattgaagaagaggggagcaaaagaatcaacatggctcatctctgtattgttggcagtcatgccgttaacggtgtggcgaagatccatagcgacatcgtaaagacaaaagtgtttaaggattttagcgagctggagcccgataaattccagaataaaacaaacggcatcacccctcgtagatggctactgctttgtaatcctggcttagcagagctcatagccgaaaaaattggcgaggactacgtgaaggacttgagtcagctgacaaagctgcacagctttttgggagatgatgtcttcttgagagagttggcaaaagtgaagcaagaaaacaagctcaaattctcccaattccttgaaacagagtacaaagtaaaaatcaatccttcatctatgtttgatgtgcaggtcaagcgcattcacgagtacaagcgacagcttttgaattgtctgcatgtgattaccatgtataacagaatcaagaaggatccaaagaaattgttcgtacctcgcaccgtgattatcgggggaaaggccgctcctggataccacatggccaaaatgatcatcaagttaatcacgtcagtggcggacgtggtgaacaacgatcctatggtgggcagcaaacttaaggttattttcctcgagaactatcgagtctctttggccgagaaggttatccctgcgactgacctttctgagcagatctctacagcaggaacagaggccagcggcaccggtaatatgaaattcatgctgaatggtgctctgacaattggcacaatggacggggccaacgttgaaatggcagaggaagcaggcgaggaaaatctctttatattcggcatgagaatcgacgacgtggctgccctcgacaagaagggctatgaagcgaaagagtattacgaagctctgccagagttgaagcttgtaattgatcagatagacaacggtttcttctccccaaaacagcctgatctgtttaaggacataattaatatgctattctaccatgatcgatttaaagtttttgctgactacgaggcgtacgtcaaatgtcaggacaaagtgtcacagctatacatgaatccgaaggcctggaacaccatggtgttaaagaacattgctgcctcaggcaagttctccagcgacaggaccataaaggaatatgcacagaacatatggaatgtggagccttccgacctgaaaatttcactgtccaatgaaagtaataaggtgaacggcaac

SEQ ID NO: 250817 - DNA, 2541 bp, synthetic construct
  misc_feature 1..2541: note = Description of Artificial Sequence: Synthetic coding sequence
  source 1..2541: mol_type = other DNA
atggccaagccacttactgaccaagagaaaagacgacaaatctcgattcgcggcatcgtgggtgtcgaaaacgtggcagaactgaagaaatcgtttaaccggcatcttcattttacgcttgtgaaggaccgcaatgtggcaaccacccgagattactacttcgcccttgcacacaccgtgcgggaccatcttgtgggtaggtggattcgcactcaacagcattactacgacaaatgccctaaaagagtgtactaccttagccttgaattctacatgggacgtaccctgcagaacactatgataaatctgggcctgcaaaacgcatgcgatgaagcaatttaccaactcgggctggacatcgaggaacttgaggaaatcgaagaggacgcgggcctgggaaacggcgggcttggaaggttggcagcctgttttctggacagtatggccaccctgggactggccgcctacggatacggcatccggtacgaatacggcatattcaaccagaagattcgggatggatggcaagtcgaggaagcagacgactggttgaggtacggaaacccttgggagaagtcgaggcccgagttcatgcttccagtccatttctatggcaaagtcgaacatactaacacgggaactaaatggatagatacccaagtggtgctggcacttccctacgatactcctgtgcctggttacatgaacaacaccgtcaatactatgagactttggtcggcccgggctcctaacgactttaaccttcgggactttaatgtgggagattacatccaggcagtccttgatcgcaacctcgcagaaaacatctcacgggtgctttacccaaacgataacttctttgaggggaaggaacttcggctgaagcaagaatacttcgtggtggcagcaactctgcaggacattatcagaagatttaaggcttcaaagtttggttcgactcgcggtgccggtactgtgtttgatgcatttccagatcaagtggcaatccaacttaacgatactcacccagctctggctatccctgaactcatgaggatttttgtcgatatcgaaaagctcccatggtccaaggcctgggaactgactcagaaaacctttgcatacaccaaccacactgtgcttccagaagcactggaaagatggcctgtggaccttgtggaaaagctcctcccccgacatctggagatcatctacgaaatcaaccaaaagcatctggacagaatcgtggcgctttttcctaaggatgtggataggttgaggcggatgtcccttatcgaagaagagggtagtaagagaattaacatggctcatctgtgtattgtggggtcccatgctgtgaatggagtggcgaagatccatagcgatattgtgaaaacgaaggtgttcaaggatttttccgagttggaacccgacaaattccagaataagaccaatggaattaccccccgcaggtggttgctgctgtgtaaccctggtctggccgagcttattgcagagaaaattggagaggactacgtcaaagatctgagccaactgactaagctgcattcctttcttggcgatgatgtgttccttcgcgaactggcaaaagttaagcaggagaacaaactgaagttttcacaattccttgaaactgaatacaaggtgaagattaatccatcgtcgatgtttgatgtccaagtgaagcgcatccatgaatacaagaggcaactgcttaactgtctccatgtgattaccatgtacaacagaatcaaaaaagacccgaaaaagttgtttgtgccacgtactgtgattatagggggaaaggcagcaccaggatatcatatggctaagatgattatcaaactgataactagcgtcgccgatgtcgtgaataatgatcccatggtcgggtcaaagctgaaggtgattttcttggagaactaccgtgtctcccttgcagaaaaggttatcccagcgacggatctttcggagcaaataagcaccgcgggtaccgaggcaagcggtaccggaaacatgaagtttatgcttaacggtgcgctgaccataggaaccatggatggggcaaacgtggagatggcagaggaagccggggaggaaaatcttttcattttcggaatgaggattgacgatgtcgccgctcttgacaaaaagggctacgaagcaaaggaatactacgaagctctgccagaacttaaactcgtgattgatcagatcgacaacgggttcttttcgcccaagcagcccgatctgtttaaggacataatcaacatgctgttctaccacgatcggtttaaggttttcgcagactatgaagcatacgtcaagtgtcaagacaaagtgagccaactttacatgaatcctaaggcatggaacaccatggtcttgaaaaacattgctgccagcggaaagttttcaagcgatagaactattaaggagtatgcacagaacatatggaatgtggaaccttcggaccttaagattagcctctcaaacgaatcgaacaaggtgaatgggaat

SEQ ID NO: 250818 - DNA, 2541 bp, synthetic construct
  misc_feature 1..2541: note = Description of Artificial Sequence: Synthetic coding sequence
  source 1..2541: mol_type = other DNA
atggcaaagccccttacagatcaggaaaaacgaaggcagatctccattcgagggatcgtgggcgtcgagaatgtggcggaactgaagaaaagctttaataggcatctacacttcaccttggtgaaggatcgtaacgtggccacaacacgagactattacttcgcgctcgcccacaccgtgcgcgaccaccttgtggggcgttggatcagaacccagcaacactattacgataagtgtcctaaacgagtgtactacctgtctctggaattttacatgggacgaacgctccagaatactatgatcaatctgggcctgcagaacgcctgcgacgaagccatctaccagcttgggcttgacatcgaagagttagaggagattgaggaagatgccggtcttggtaatggggggctgggcagactcgctgcctgttttttggactccatggctacgctaggcctagccgcctatggatacgggataaggtatgagtatgggattttcaaccagaagatccgagatggctggcaggtcgaggaagctgatgactggttgcgatacggcaatccgtgggaaaagtctcgccccgagtttatgctgcccgtgcacttttatggtaaagttgaacatacgaacaccggaaccaagtggatcgatacccaggttgtactggccctgccctacgacaccccagttccaggctacatgaacaataccgtgaacacgatgcgactgtggagtgcaagagcccctaacgattttaatctaagagacttcaatgtcggagattacattcaggcagtgctagatcggaatctggccgaaaatattagcagagtgttgtacccaaacgataactttttcgagggcaaagaactccgactgaaacaagagtattttgttgtagcagccactctccaagacattatacgtcgatttaaagcctcaaaattcgggagcacccgaggggccggtaccgtgttcgatgcatttcctgaccaggttgccatccagcttaatgatacccatccagcactcgcgatcccagagctcatgaggatttttgttgacatcgaaaaactgccctggagtaaagcgtgggaactcacccaaaaaacatttgcatataccaaccataccgtcttgccggaggccctcgaacgatggcctgtggatctggtagaaaagctgctgccacgacacctggagattatctacgagatcaatcagaagcacctcgatcgtatcgtggctctattccctaaagacgttgaccgactgcgaaggatgtccctgatagaggaggagggaagtaaacgaattaacatggcccacctatgtatcgtggggtcacacgcggtaaatggagttgccaaaattcactccgacatcgtcaaaaccaaagtgttcaaggatttctcagagctggaacccgacaaattccaaaacaagactaatggcattacccctcggcgatggctactgctctgcaaccccggtctcgctgaactgatcgccgagaagatcggtgaagattacgtgaaggatctgagccagttgacgaagcttcattccttcctgggggacgacgtttttctacgggaactcgctaaagtgaagcaggagaacaaactgaagttctcccagttcctggagaccgagtataaggtcaaaatcaatccctcatctatgttcgacgtgcaggtgaagcgaatacatgagtacaagaggcaactgctgaattgcctccacgttatcaccatgtacaacagaattaaaaaggatcccaaaaaactgtttgtcccccgaactgtcattattggaggcaaggccgccccaggttatcatatggctaagatgataatcaagttgatcaccagcgttgcagatgtggtaaataacgatccgatggtcggcagcaaactgaaagtaatctttctggaaaactatagagtctctctggctgaaaaggttatcccagccacagatttaagcgaacagatttcaaccgctggcacggaggccagcggcaccggcaacatgaaatttatgctcaatggcgctctcaccatcgggactatggacggcgctaacgtggaaatggcagaagaggccggcgaagagaatctttttattttcgggatgcgaatagatgatgtcgctgctttggacaaaaagggctacgaggctaaggagtattatgaagcgctgcctgaactgaaacttgtaatcgatcagatcgacaatggatttttttcccctaaacagcctgacctcttcaaggacatcatcaacatgttattctaccatgatcgattcaaagtgtttgctgactacgaggcatacgtgaaatgccaagataaggtgagccaactatacatgaacccaaaggcttggaataccatggtgctaaagaacattgctgcctccgggaaattctcctcggatcgcacaattaaagaatatgcacagaatatttggaatgtagaaccgtccgatcttaagatcagcttgtccaacgaatccaataaagtcaatggaaat

SEQ ID NO: 250819 - DNA, 2541 bp, synthetic construct
  misc_feature 1..2541: note = Description of Artificial Sequence: Synthetic coding sequence
  source 1..2541: mol_type = other DNA
atggccaagcctctgaccgatcaggagaaaagaaggcagatctcgatccggggcatcgttggggttgagaacgtggccgagctcaagaaaagcttcaatagacaccttcatttcaccctcgtcaaggatcgcaatgtggccacgaccagggactactatttcgcactggcacacaccgtccgcgatcatctggtgggacgctggatccggacccagcagcattactacgataaatgccccaaaagagtgtactacctctctctcgagttttatatgggccgaaccttgcagaacactatgatcaacctcggcctgcagaatgcctgcgacgaagccatctatcagcttggcctggacattgaggagctcgaagagatcgaggaggacgcagggctcggaaatggaggcttaggcagactggccgcatgcttccttgatagcatggccactttgggattagctgcatatggttatggaattcgttacgaatacggcattttcaaccaaaagatccgagatggctggcaggtcgaggaagctgatgactggcttcgatacggaaatccatgggagaagtctcgccctgagtttatgcttcccgtgcatttctatggaaaagtagagcacaccaacacaggcactaagtggatcgacacccaggtggtacttgctttgccatacgacacaccagtacctggttatatgaacaacaccgtcaatacaatgcgtctatggtccgcacgggcacccaacgactttaatcttcgggacttcaacgttggtgactacatacaagccgtgttagacaggaacctagctgaaaacatttcacgggtcctatacccgaacgacaatttttttgagggtaaagagctgcgcttgaagcaagagtatttcgttgtcgccgctacgcttcaggatatcatccgccgattcaaggcctcgaagtttggatccaccaggggtgcaggcactgtgtttgacgcctttccagaccaagtggctatccagttaaacgacacacacccagcattagccattcccgagctgatgagaatctttgtggatattgaaaaactgccctggtctaaggcctgggagttgactcaaaagaccttcgcctacactaatcataccgtgctcccagaggctcttgagcgatggccagtcgacctcgtggaaaagctattaccgagacatctcgagatcatctacgagataaaccaaaaacacctcgatcgtattgttgccctgttcccaaaggacgtggacaggctgcgccgaatgagtctgattgaggaggaaggaagcaagaggattaacatggcacatctttgtatcgtcggctctcacgcagttaacggcgtggcaaagatacatagtgatatagtgaagacaaaggtcttcaaggacttctcagaactcgagcctgacaaatttcagaataagactaacgggatcacacctagacggtggttgctactttgtaatcctggactcgcggaattaatagctgaaaaaatcggggaggactatgttaaagatctttcacagctaaccaagctgcacagtttcctcggcgacgatgtattcctgagagagctcgccaaagttaagcaggaaaataaactcaagttctcacagttcctcgagaccgagtacaaggtgaagattaatcccagtagtatgttcgacgttcaagtgaaacgcatccatgaatataaaagacagctgctgaattgtctgcacgtgattaccatgtataatcggatcaaaaaagatcccaagaaactatttgttccaaggacagtcatcatcggcggcaaagccgcaccaggttaccacatggcaaagatgattatcaagctgatcacaagtgttgccgacgttgtgaataatgacccaatggtgggtagtaagttgaaagtcatctttctggagaattatagggtgtctttagccgagaaggtgattcccgccacggacctgagcgagcagatctccactgccggcaccgaggcctctggaactgggaacatgaagttcatgctgaatggagctcttacgatcggtacaatggacggcgcaaacgtcgagatggctgaagaagcaggcgaagagaacctattcatctttggaatgagaatcgatgacgtggctgctctggataagaaaggatacgaagcaaaagaatactatgaggcccttcctgagttgaagctggtaattgatcagattgacaacgggttttttagcccgaaacagccggacctgtttaaagacataattaacatgctcttctatcacgacaggttcaaggtattcgccgattatgaggcttacgtgaagtgtcaagacaaagttagtcagctctatatgaatcctaaggcttggaacacaatggtcctgaaaaacatcgccgcttctgggaagttctcatctgatcgaactatcaaggagtacgcacagaacatctggaatgtagaacctagcgacttaaagatctcactttctaacgagtcaaacaaagtcaatggaaac

SEQ ID NO: 250820 - DNA, 2541 bp, synthetic construct
  misc_feature 1..2541: note = Description of Artificial Sequence: Synthetic coding sequence
  source 1..2541: mol_type = other DNA
atggctaagccccttacagaccaggagaagagacgtcagattagcattaggggcattgttggcgtcgagaacgtggcagaactgaagaaatcgttcaaccgacacctccactttaccctggttaaggatagaaacgtggcaaccacccgcgattattacttcgccctggcacatactgttagagatcacctggtcgggaggtggattcggacccaacagcattattatgataagtgtcctaagagggtgtactatctctccctggaattctacatgggtaggacgctgcaaaacacaatgattaacttgggcctccagaatgcttgtgatgaagccatttaccagctgggcctcgatattgaggaactcgaggagatcgaggaggacgccggattgggcaatggtgggcttgggaggctcgcggcctgtttcttagacagtatggcaactttgggtctcgccgcctacggatacgggattagatatgagtacgggattttcaaccaaaagatccgcgatggatggcaggtggaggaggctgacgactggttacgctacggcaacccatgggagaaatcccgacctgaatttatgctgcctgtgcatttctatgggaaagtggaacatactaacaccggaactaaatggatcgacacccaagtggtgcttgcgttgccttatgacactcccgtgccagggtacatgaacaacaccgtgaatacgatgcgcctctggtccgcccgggcccccaatgacttcaacctgcgggacttcaacgtaggagactatatacaggcggtgctggaccgcaatctagcagaaaatatatcccgagtgctctatcctaacgataacttctttgagggcaaggagctgcggttgaagcaggaatactttgtggtggctgccactttgcaggacataattagaaggtttaaagcatcgaaattcggaagtactaggggtgccggaacagtgttcgacgccttcccagatcaggtagctattcagctgaatgatactcacccagcgttagccattcctgagcttatgcgcatcttcgtcgacatcgagaagttaccctggagcaaggcctgggagctgactcagaagacgtttgcttatactaaccatacagtgctgcccgaagctctcgagcgatggccagtagacttagtggaaaaattgctgccgcgtcatcttgagatcatttacgagatcaaccaaaagcacctcgacaggatcgttgccctctttccaaaagacgtggaccgcttgcgtcggatgtctctgatagaggaggagggctctaagaggatcaacatggcccacctgtgtattgtgggaagtcacgccgtcaacggcgtggcaaagatacacagtgatatcgtgaaaaccaaagtgtttaaggactttagtgaactggagcccgacaaatttcagaacaagacaaatggcattacccctcggcgatggctgcttctgtgcaaccccgggctggctgagctgattgctgagaaaataggcgaagattatgtgaaagacctcagccagctgacgaaactccatagtttcctgggtgacgatgtgtttctgcgggagttggctaaggtcaaacaggagaacaaacttaagttctcccagttcctggaaaccgagtataaggtaaagatcaatccaagttccatgtttgacgtacaggtcaagcgcatccacgagtataagagacagctgctgaactgtctacacgtcatcacgatgtataaccggatcaaaaaagacccgaagaagctctttgtccctaggacagtgatcatcggcggcaaagcggcccctgggtatcacatggcaaagatgatcatcaagctgatcacgagcgtggccgacgtggtgaataatgaccctatggtgggctcaaagctgaaagtgattttccttgagaactatcgtgtatcattggcggaaaaggtgatacctgccacagacctctcagaacaaatttctacggccggcacggaggcctcgggtacaggaaacatgaagttcatgttgaacggagctctcacgattgggaccatggatggcgcaaatgtcgaaatggcagaagaagctggtgaggagaacctattcatcttcgggatgaggattgacgacgtcgccgctctagacaagaaggggtatgaagctaaggaatattacgaggctctgcctgaactgaagcttgtgatcgatcaaattgacaacgggtttttttcacccaagcaaccagatttgtttaaagatatcatcaatatgctgttttaccacgacaggttcaaggtgttcgctgattatgaagcctacgtcaaatgtcaggacaaggtctcccaactgtatatgaaccccaaggcctggaatacaatggtcttgaagaatattgcagcctcaggaaaatttagctcagatcggacaatcaaggagtacgctcagaacatctggaatgttgagccaagcgacctgaaaatttccctgtctaatgagagtaataaagtaaatggaaat

SEQ ID NO: 250821 - DNA, 2541 bp, synthetic construct
  misc_feature 1..2541: note = Description of Artificial Sequence: Synthetic coding sequence
  source 1..2541: mol_type = other DNA
atggctaagccacttactgaccaggagaaaaggaggcagatcagcattcggggaatagttggcgttgagaatgttgcggaactgaagaagtcatttaataggcacctgcatttcacactggtaaaggaccgcaacgttgctaccaccagggactactacttcgcgttagcccatacagtccgggatcatctggtgggacgatggatccggacacagcaacattactacgacaaatgcccaaagcgggtctattatcttagtctggagttctatatgggtagaaccctccagaatacaatgattaaccttggcctgcagaatgcatgtgatgaggctatctatcagctgggtcttgacatcgaagagctagaggagatagaagaagacgcgggactgggaaacggtggattggggagactcgcagcatgctttctcgatagcatggccaccctgggccttgcggcctacggctacggtatcagatacgaatacgggatctttaaccagaaaattcgggacgggtggcaggtcgaggaagcagatgactggttgcggtatggaaatccttgggaaaagagccgaccagagttcatgctgcccgtgcacttctatggaaaggtggagcatacaaatacaggtacaaagtggatagatactcaggttgtcttagcattgccctacgacacccctgtgcctggttacatgaacaacaccgtaaacaccatgcgactgtggagcgcccgggccccaaacgacttcaacctccgtgattttaacgtgggggactacatccaagccgtgctggatagaaacctggctgaaaacattagccgcgttctataccccaacgataactttttcgaaggcaaagagctgaggttaaaacaggagtactttgtggtggccgcgacactacaagatattatcagaaggttcaaagcctctaaatttggtagcacaaggggtgctggaactgtgtttgacgcctttcccgatcaagtggctattcagttgaacgacacccaccctgctttagcaatccccgagttaatgcgcatatttgtcgacattgaaaaacttccctggtccaaggcctgggaactgacccaaaagacatttgcgtatactaatcatactgtgttgccagaggccctagagcggtggcccgtagacttggtggagaagttgctccctaggcatctcgagatcatttacgaaataaatcaaaaacaccttgacaggattgtagcactgtttcccaaggatgtcgatcgactgcgaaggatgagcctgatcgaggaggaggggtccaagcggatcaatatggcccacctgtgtatagtgggctctcatgctgtgaacggggtggcgaaaatccattcagacatagttaaaacgaaagtcttcaaagatttctccgaactggaaccagacaagttccagaacaaaacgaacggcattactccccggcgctggctgctcctgtgcaacccgggacttgcagaactcattgctgagaagatcggggaggactatgtgaaagatctttcccaactgaccaagctccattctttcctgggggacgacgtgttcctcagagaattagccaaggtgaagcaggagaacaagctaaaattctctcagttcctggaaaccgaatacaaagttaagataaacccctcaagtatgtttgacgtacaggtgaaaaggatccacgaatataaaagacagctgcttaactgcctacacgtgattactatgtataacaggattaagaaggatcctaagaaacttttcgttccgcggactgtcattatcggaggtaaagcagcccctggctatcatatggcaaaaatgatcataaaactgatcacatctgtagccgacgtggtcaacaacgacccaatggtgggatctaaactgaaggtgatctttctggaaaactacagggtctctctcgcagagaaagtgatccccgccacagatctgagtgaacagatctctaccgccgggacagaagccagcgggacagggaacatgaaattcatgctcaatggcgcccttaccatagggacaatggatggggcgaacgtggagatggccgaagaggccggtgaggaaaacctcttcattttcggtatgaggattgacgacgtggctgccctggataagaagggttacgaagccaaggagtactatgaggcattgccggaactaaaattggtcatagatcaaattgacaacggctttttttcacctaaacagccggatctcttcaaggatatcataaacatgttgttttaccacgatagattcaaggtctttgccgattatgaagcttatgtcaagtgccaggacaaggtttcccaactatatatgaatccgaaggcatggaatacaatggtgttgaaaaacatagctgcttctggcaagttctcttctgataggaccattaaggagtatgctcagaacatttggaacgtcgaaccttcggatctgaaaatctccctgagtaacgagtccaacaaggttaacggtaac

SEQ ID NO: 250822 - DNA, 2541 bp, synthetic construct
  misc_feature 1..2541: note = Description of Artificial Sequence: Synthetic coding sequence
  source 1..2541: mol_type = other DNA
atggcaaaacctctcaccgaccaagagaagcgtcggcaaattagcattcgcggtatcgtgggagtggaaaacgtcgcggagcttaagaagtcttttaacagacacctccacttcaccctggtgaaggatagaaatgtggcgactactagggactactacttcgccctggcgcataccgtgcgggatcacctcgtgggacgctggatccggacccagcaacattactacgacaaatgtccaaaaagggtttactatcttagcctcgaattctatatgggacgcacccttcagaatactatgattaatctgggtctgcagaatgcgtgcgacgaagccatctaccagctgggactggacatagaggagcttgaagaaatcgaggaggacgccggactcggaaacggtggactgggacgactcgccgcctgttttctggattccatggcaacgctgggtctggccgcttacggatacggtattagatacgaatacggaatctttaaccagaagatccgggatggatggcaggttgaggaagctgacgactggttgcgctacggaaatccctgggagaagagccgcccggaattcatgctgccggtccatttctacggaaaggtggagcacaccaatactggcactaagtggatcgatacccaagtggttctggctctgccttacgacaccccggtgccaggctacatgaataacactgtcaatactatgcgcctgtggagcgcacgggcgccgaacgacttcaacctgcgggatttcaacgtgggcgattacattcaagcagtactcgaccgcaacctggccgagaacatctccagggtgctctacccaaacgacaactttttcgagggaaaagaactccggcttaagcaggaatacttcgtggtggcggccaccctccaggacatcattagaagatttaaggcgtcgaagttcggatcgacccgcggcgccggcaccgtctttgacgctttcccggatcaggtcgcgatccagctgaacgatactcatccagcgctggcaattccggagttgatgcggatcttcgtcgatatcgaaaagttgccgtggtccaaggcttgggaattgacccaaaagacgttcgcatacactaaccacaccgtgctgcctgaagctctggagcgatggccggtagaccttgtggaaaagctcctgcctcggcacctcgagatcatctacgaaatcaatcaaaaacacctggataggatagtcgccctgttccccaaggacgtcgatcgcttgaggcgcatgtcgctgatcgaagaagaaggatcgaagcgcatcaacatggctcatttgtgtatcgtcgggtcacatgcggtcaatggggtggctaaaatccacagtgacatcgtcaaaacgaaggtgtttaaggatttctcagagctggagcccgataagttccagaataagaccaacggcatcaccccgcgccgttggctgttgctgtgcaacccaggactggcggagctcatcgcggagaaaatcggcgaagattacgtgaaagaccttagtcagctgaccaagctgcacagctttcttggcgatgacgttttcctccgggaacttgcaaaagtgaaacaagaaaacaagctgaagttttcccagttccttgaaaccgaatacaaggtgaagattaacccttcaagcatgttcgacgtgcaggtgaaacggatccacgagtacaaacgccagctcctgaactgtctccatgtcatcactatgtacaatcggatcaagaaggacccgaagaagctgtttgtcccgaggactgtgattatcggcggaaaagccgcgccgggataccacatggccaaaatgatcattaagctgatcacttccgtggccgacgtcgtgaataacgatcctatggtcggctcgaaactcaaggtcatctttctggagaactatagagtgtccctggctgaaaaggtgataccggctaccgatctctcagagcagatctctactgccgggaccgaggcttccggcactggaaatatgaaattcatgctgaatggtgcactcactatcggaacgatggatggcgcaaatgtggaaatggccgaggaggcgggtgaagaaaacctgtttatcttcggtatgcgcattgacgatgtggcagcactggacaagaaaggttacgaagcgaaggaatactacgaggccctccctgaactgaagctggtgatcgaccaaatcgataatggattcttctcgccgaaacagcctgatctgttcaaagacatcatcaacatgctgttctaccacgacagattcaaggtgttcgcagactacgaggcctatgtgaagtgccaagataaggtgtcgcagctttacatgaacccaaaagcctggaatactatggtgttgaagaatatcgccgcttcagggaaattctcttcggatagaactataaaggaatacgcccaaaacatctggaatgtggagccatcggacttgaagatctctctctccaacgagtcgaacaaggtgaatggaaac

SEQ ID NO: 250823 - DNA, 2541 bp, synthetic construct
  misc_feature 1..2541: note = Description of Artificial Sequence: Synthetic coding sequence
  source 1..2541: mol_type = other DNA
atggctaaaccattgaccgatcaggaaaaacggcggcaaatttctataagaggaattgttggtgtcgaaaacgttgccgaactgaaaaagagcttcaaccgccatctccatttcacgcttgtaaaagatcgtaacgtggctaccaccagggattactattttgctctcgctcacacagtgagagatcacctagtgggacgttggattcggacgcagcagcattattatgataaatgtcccaagcgagtttactacctatctctcgagttctacatgggccggactctgcagaataccatgatcaatctgggcctccagaatgcatgtgacgaggcgatctaccagctcggtctggacatagaggagttggaagagattgaagaggacgcgggcctgggcaatggcgggctaggtagactagccgcctgttttcttgactcaatggccacactgggcctagccgcctacggctacgggatcaggtatgagtatggcatttttaaccagaagattcgcgatggctggcaggtggaagaagcggatgattggctccgctatggcaatccttgggagaagagcaggccagagtttatgcttcctgtgcacttttatggcaaggtcgagcacaccaatacaggaactaaatggatcgacactcaggtagtgcttgccctcccgtacgacaccccagttccaggttacatgaacaatactgttaacactatgagattgtggagcgcccgcgctcccaatgatttcaacctgcgggatttcaacgtcggcgactacatccaggccgtcctagataggaatttggcagaaaacatttcccgggtgctgtacccgaatgataatttctttgaaggtaaggagctgaggcttaagcaggagtatttcgtcgtggctgccaccttgcaggatatcattaggcggtttaaagctagcaagttcgggtcaaccagaggggccgggacggttttcgatgcattcccagaccaggtcgcgattcaactgaacgatactcaccctgctttggctatcccggagctgatgcggatcttcgtcgacatcgagaagctcccttggagtaaggcttgggaactgacgcagaaaacattcgcttataccaatcataccgtgctcccggaagctttggaaagatggccagtggacttagttgaaaaactactgccccggcatttggagattatctatgaaatcaaccagaagcatctggatcgcattgtcgcgctgtttccgaaggacgttgatcgtctgcgtcggatgtcccttattgaagaggagggaagtaaacgtattaatatggctcacttatgcatagtgggatcccacgccgtgaacggggtggccaagatccactcagatattgtgaagactaaggtgttcaaagatttttctgaactggagccagataagtttcaaaacaagacgaacggtattacgccccggagatggttgttgctttgcaaccctgggctcgctgagctgatcgccgagaagatcggagaagattacgtaaaagatctatcccagctcacaaagctccacagtttcctgggggatgacgtattcttgcgggaattggctaaagttaagcaggagaataagctgaagttctcccagttccttgaaaccgagtacaaggtgaaaataaacccgtcttcaatgttcgacgttcaggtcaagagaatccacgagtacaaacggcagcttctcaactgcttgcacgttatcaccatgtataaccgcatcaagaaggacccaaaaaaactgtttgtgccgagaaccgtgattatcggcggaaaggcggcccccggttaccatatggctaagatgattataaaattgatcaccagtgtcgctgatgtcgtgaataatgaccctatggtaggcagcaagctgaaggtgatattcctggagaattatcgcgtctcactggccgagaaagtcatccccgcgacggatctgtctgagcagataagcacagccggcaccgaagcctcaggtaccggcaacatgaaattcatgcttaatggtgctttgacaataggcactatggatggggcgaacgtagaaatggctgaagaagcaggagaagagaatctcttcatttttgggatgcggatcgacgacgtggccgctctggacaagaagggctatgaggccaaggagtactacgaggccttgcctgagctcaagctggtgattgaccagatcgataacgggtttttcagtccaaaacagcctgatctttttaaagacataatcaacatgctcttctatcacgaccgcttcaaagtctttgcagattacgaggcctatgtgaaatgccaggacaaggtgagccagctttatatgaaccccaaggcttggaacacaatggtcctgaaaaacatcgctgctagcgggaaattctctagcgacaggacgatcaaggagtatgcccagaacatctggaacgtggaaccaagcgatttgaagatctcattatctaatgaatccaataaagtgaacggcaac

SEQ ID NO: 250824 - DNA, 2541 bp, synthetic construct
  misc_feature 1..2541: note = Description of Artificial Sequence: Synthetic coding sequence
  source 1..2541: mol_type = other DNA
atggcaaagccactcaccgatcaggaaaagcggcgccagattagcattagaggtatcgtgggagtcgaaaatgtggcagaactgaagaaaagtttcaataggcaccttcattttacgctggtgaaggatagaaatgtggcaactaccagagattactacttcgcactcgcacatactgtccgagatcatcttgtgggaaggtggatcaggacgcagcaacattactacgacaagtgccccaagcgggtgtactacctctcactggagttttacatgggcagaacccttcaaaacactatgattaacttggggctccaaaatgcctgcgatgaggcaatataccaactgggcttggacattgaagagctcgaagaaattgaagaagatgcaggactcggaaacgggggccttggtcgacttgccgcgtgttttctggattcgatggccaccttgggactggcggcttatggttacgggatccggtacgaatatgggatctttaaccaaaagatccgcgacggatggcaagtggaagaagcagacgattggctccgttacggaaatccgtgggaaaaatcacggcccgaattcatgctccctgtccacttctacggtaaagtcgaacataccaatactggaaccaagtggatagatacgcaagtggtccttgcattgccttacgacacgcctgtgccgggatacatgaacaacaccgtgaatacgatgcgactctggtcggctcgtgctccgaacgactttaatctcagggacttcaacgtgggagactacatacaggccgtgttggatagaaatcttgccgaaaacatctcgcgtgtgctttatccaaatgacaactttttcgaggggaaagagctgcgactgaaacaggaatacttcgtggtcgcggcaaccctgcaagacatcattcggaggttcaaggcgagcaaattcggttccactagaggcgcaggtaccgtttttgatgccttcccagatcaagtggcaattcaactgaacgatacccaccctgccctcgcaattcctgaacttatgaggatttttgtggatattgagaaattgccttggtccaaggcctgggaattgactcaaaagacctttgcctacactaatcacaccgtgcttccagaggcgcttgagaggtggccagtggatctcgtcgagaaactcctcccaaggcacctggagattatctacgagattaatcagaagcatctggaccgtattgtggccctctttccaaaggatgtggacagacttcggaggatgtcattgattgaagaggagggatccaagaggataaacatggcgcacctttgcatcgtcggatcgcatgcagtcaacggcgtcgctaagattcatagcgatatcgtcaaaaccaaagtctttaaggatttttcggaactcgagccggacaaatttcagaacaagaccaacggaattactcctcggaggtggctcctgctgtgtaatccgggtttggctgaactgattgccgaaaagatcggtgaagattacgttaaggatctgagccaacttaccaagctccattcatttcttggagatgacgtgtttctccgagaacttgcaaaggtgaagcaagagaacaagctgaagttttcacaattccttgagactgaatacaaagtcaagattaaccctagttcgatgtttgatgtgcaagtgaagcggatccatgagtataagcggcagctgcttaattgtctgcatgtcatcaccatgtacaaccgcatcaagaaagaccccaagaagttgtttgtgccacggactgtgattatcggagggaaagcagcgccaggttaccacatggccaagatgatcataaagctgataactagcgtggccgacgtggtgaacaatgatccgatggtgggcagcaagctgaaggtcatatttctcgagaactacagggtgtccctggcagaaaaagtcatccctgcaactgatcttagcgagcagatatctactgccggaacggaggcatcgggtaccgggaatatgaagtttatgcttaatggagcgctgacgattgggaccatggatggggcaaacgtggaaatggccgaagaagcgggtgaagaaaatctcttcatcttcggcatgagaattgatgatgtggcagccctggacaaaaagggatacgaagcaaaggaatactatgaagcattgccagaactgaaactggtgatagatcaaattgataacggctttttcagccctaagcagcctgacctgtttaaagacattatcaacatgctcttttaccatgatcgcttcaaggtgttcgcagattacgaggcgtacgtgaagtgtcaagataaggtatcgcaactgtacatgaacccaaaggcttggaacactatggtccttaagaatatcgcagcttcaggaaagttttccagcgaccgcactattaaggagtacgctcagaacatttggaacgtggagccgagcgatctcaagattagcctttccaacgagtccaataaagtcaacggtaac

SEQ ID NO: 250825 - DNA, 2541 bp, synthetic construct
  misc_feature 1..2541: note = Description of Artificial Sequence: Synthetic coding sequence
  source 1..2541: mol_type = other DNA
atggcaaagccgctaacggatcaggaaaaacgccgtcaaattagcatccgtgggatagtgggcgtagagaatgtggcagagctcaaaaaatctttcaatcgacatctccacttcaccctggttaaggatcgcaatgtcgccaccacgcgggactattattttgccctggcccacactgtgcgggaccaccttgtcggccgttggatcaggacccagcagcactactacgacaaatgtccaaagagggtgtactatctctcgctggaattctatatgggcagaactctgcagaataccatgattaatttaggactgcaaaacgcctgtgatgaggctatctaccaactgggcctcgatatagaggagctggaagagattgaagaagacgctggattggggaacgggggccttggcaggcttgcagcctgttttctcgattctatggctacgctgggtctagccgcatacggctatggaataaggtacgaatatggaatcttcaaccagaagatacgcgatgggtggcaggtggaggaagcagatgattggctgcgctatggaaacccttgggagaagtcccgaccagaatttatgctgccagtgcacttttatggtaaggtggagcacacaaacacaggcacaaaatggatcgatacccaggtggtgctcgcattaccatatgatactccagttccagggtatatgaacaataccgtgaacactatgcggctctggagcgcgagggcaccgaatgactttaacttgagggatttcaacgtgggggactacatccaggcagtgcttgacagaaatctcgccgagaacatcagtcgagtactatatcctaacgataatttctttgaaggcaaggaactgagactcaaacaagaatactttgtagttgctgcgacactgcaggacatcattcgccgattcaaagcttccaaattcggttctacgcgtggagccggtaccgtgtttgacgcattccccgatcaagtggcaattcagctgaacgacacacaccccgcactggcaatccccgagctgatgcggatttttgtggacattgagaaactcccatggtcaaaagcctgggagctgacgcagaagaccttcgcttacactaaccatactgtcctgccagaagcccttgagcgctggcccgtggatctggtcgagaaattactgccacgccatctggaaattatctacgaaattaatcaaaagcacctggatcgcattgttgcgctgtttccaaaggacgtggatcgcttgcgcagaatgagcctcatcgaggaagaaggaagcaagagaataaatatggcccacctttgtatcgtaggatctcacgcggttaatggtgtagccaaaattcatagcgacatcgtgaaaactaaggtgttcaaagacttcagcgaattggaaccggataagtttcaaaacaagaccaatggaattacccctcgaaggtggttgctgctctgcaatcccgggcttgcagagcttatcgctgagaaaatcggtgaggactacgtgaaagatctgtctcagctgacaaagttgcatagttttttgggcgatgacgtcttcttacgggaactggcaaaggttaaacaggagaataagttgaaattctcacagttcctggaaacggagtacaaggtaaagatcaacccatcgtccatgtttgatgtgcaggtgaaaagaatacacgagtacaagaggcaactgttgaactgcctgcacgtgatcactatgtacaataggatcaagaaggaccctaaaaagttgttcgttccgcgaactgttatcatcggaggtaaggctgcaccagggtaccacatggctaagatgatcatcaaactaataacctccgtagccgacgtggtgaacaacgatccaatggtggggagcaaattgaaagttatctttctggaaaactatcgtgtgagcctcgcagaaaaggtgattcccgctactgatttgtctgagcagatctctaccgctggaactgaggcctctggcaccggcaacatgaagttcatgctgaatggcgccctcaccatcggcacaatggacggggcgaacgttgagatggcagaggaagcaggcgaggagaacctgtttattttcggcatgcgtatcgatgatgtggctgccctagacaaaaaaggctatgaagccaaggagtattacgaagccctgcccgagctgaaacttgtgatcgaccagattgataatggcttcttctccccgaagcaacccgatctgttcaaagacattattaatatgctgttttaccacgacagattcaaagtttttgccgactatgaggcctatgtgaagtgccaggacaaagtcagtcagctgtatatgaaccccaaggcctggaatacaatggttctgaagaacatcgccgcctcaggaaagttctctagtgatcggactataaaggaatatgcccagaatatttggaacgtggaacctagcgacctgaagatcagcctgagcaatgagtccaataaagttaatgggaac

SEQ ID NO: 250826 - DNA, 2541 bp, synthetic construct
  misc_feature 1..2541: note = Description of Artificial Sequence: Synthetic coding sequence
  source 1..2541: mol_type = other DNA
atggccaagcctctgactgaccaagaaaagcgacggcaaatttccatccgcggaatcgtcggtgtggagaacgtcgccgaattgaaaaagtcgttcaaccggcacttgcacttcaccctcgtgaaggacagaaatgtggcgaccacccgcgactactacttcgctttggcccacaccgtgcgggaccatctcgttgggcggtggatccggactcagcagcattactatgacaagtgcccaaagagagtctactacctctccctggagttttacatgggcagaaccttgcaaaacacgatgatcaacctcggtctgcaaaacgcgtgtgatgaagcgatttaccagctgggccttgatattgaggagctggaggagatcgaggaggatgccgggctgggaaacgggggactgggacgtcttgccgcgtgtttcctcgactcaatggcgacgctgggattggcggcatatgggtacggaatcagatacgaatacggtatcttcaaccaaaagatacgagatggatggcaggtggaagaagcggacgattggcttagatacgggaacccgtgggagaagtctcgacctgagttcatgcttccggtgcacttttacggaaaggtcgaacataccaataccggaactaaatggattgatactcaagtggtgttggcgctcccgtacgatactccagtgccgggctacatgaacaacaccgtgaacaccatgagactgtggtccgctcgcgccccgaacgatttcaatctgagagacttcaacgtgggagactacatccaagccgtgctcgacagaaatctggcagagaatatctcaagggtcctttaccccaacgataactttttcgagggaaaggaactgaggctgaaacaggagtacttcgtggtggctgcgactctgcaagacatcatacgccgattcaaagcgagcaaatttggctccactagaggtgcgggaaccgtgttcgacgcattcccggaccaggtggctattcagctgaacgacacccaccctgcactggcaatcccggaactgatgaggatctttgtggacatcgaaaagctcccgtggagcaaggcgtgggagttgacgcagaaaacctttgcttataccaatcatactgtgctcccagaagctctggagcgctggccagtggatcttgtggaaaagctcctccctcgccacttggagatcatctacgagatcaaccagaaacaccttgatcgcatcgtggctctgttccctaaggacgtcgatcgcctccgcagaatgtcccttatcgaagaagagggatcaaaacgcatcaatatggcgcacctctgcatcgtgggttcacacgccgtcaatggcgtcgcgaagatacattcggacatcgtcaaaacgaaggtctttaaggatttttccgaattggaaccggataagttccagaacaaaaccaatggaattactcctcgccgctggctgctgctctgcaatccgggactggccgaattgatcgctgaaaagatcggggaggactacgtcaaggatcttagccaactgaccaagctccactcgttcctcggcgatgacgttttcctgcgtgaactggccaaggtgaagcaggagaataagttgaagttttcacagtttttggaaaccgaatacaaggtcaagatcaatccaagcagcatgtttgatgtccaggttaagagaattcacgagtacaagcggcaacttctgaactgtctgcatgtcattactatgtacaaccggattaagaaagacccgaagaaactgttcgtcccgcgaactgtgatcatcgggggaaaggccgctccgggttatcatatggcaaagatgatcatcaaactgatcacctccgtggcagatgtcgtgaacaatgatccaatggtgggatcaaagctgaaggtcatttttctcgagaactaccgggtgagcctggccgaaaaggtgatccctgccaccgacctctcggaacagatctcgacggccggcactgaagcctcgggaactggaaacatgaagttcatgctgaacggagctcttactatcggcactatggatggcgccaacgtcgaaatggccgaagaggccggagaggaaaatctgttcatctttggtatgagaatcgacgacgtggctgcgttggacaagaaaggatacgaggccaaagaatactacgaggctctgcccgagctgaagctcgtcatcgaccaaatcgacaacggcttcttctcgccaaaacagccagacctgttcaaagacatcatcaacatgctcttttaccacgatcggttcaaagtgttcgcagactacgaagcatacgttaagtgccaagataaagtctctcagctgtatatgaatcctaaagcctggaatactatggtgttgaaaaacatcgctgcctcagggaagttctccagcgatcggactatcaaagaatacgcgcagaatatctggaacgttgagccgtccgatctgaagatctcgctgtcgaacgaatccaacaaggtgaatgggaac

SEQ ID NO: 250827 - DNA, 2541 bp, synthetic construct
  misc_feature 1..2541: note = Description of Artificial Sequence: Synthetic coding sequence
  source 1..2541: mol_type = other DNA
atggcaaagccactgactgaccaggagaagcggaggcaaatctcaatccgcggaatcgtcggagtggagaacgtcgcggagctcaagaagtccttcaatagacacctccacttcaccctcgtgaaagatcggaatgtcgccaccactcgggattactacttcgcgcttgctcacaccgttagggatcatctggtcggacggtggatcaggacccaacaacactattacgacaaatgcccgaaacgcgtgtactacctgtcactggaattctatatgggacgcactttgcagaacactatgatcaacctgggacttcagaatgcttgtgatgaagccatctatcagctgggactggacatcgaggaactggaggaaatcgaagaggacgctggcctcggtaatggaggtttgggtcggctggcggcctgcttcctggactccatggcaaccctgggactggcagcgtacggatacggaattcggtacgaatatggaatcttcaatcagaaaatccgagacggatggcaagtcgaggaggccgatgattggctccgctacggcaacccttgggagaagtcaagacctgagttcatgctcccggtgcacttctatggcaaggtggagcatacgaacaccggaactaaatggattgacacccaagtggtgttggccctcccttacgataccccggtgccggggtacatgaacaacactgtgaatactatgcgcctgtggtcggcaagggcaccgaacgacttcaacctgagagatttcaacgtcggcgactacatccaggccgtgctcgaccgcaacctggcagagaacatttcccgggtgctttacccgaacgacaatttcttcgaaggaaaggagttgcgccttaagcaggaatacttcgtggtcgcggcaactcttcaagacatcatccggagattcaaggcctcgaagttcggaagcactcggggagcgggcaccgtctttgacgcatttccggatcaggttgcaatccaacttaacgatacccacccagccttggcaatccctgaactgatgcgaatcttcgtcgacatcgaaaaactgccttggtcaaaggcttgggaactgacccagaaaaccttcgcgtacaccaatcataccgttctgccggaagccctcgaaaggtggccggtggacctggtggagaagctgctcccgcgccacctggagatcatctacgagattaatcagaagcatctggacagaatcgtggccctgtttccaaaggacgtggaccgcctgaggcggatgtcactgatcgaagaggaaggttcgaaacgcatcaacatggctcatttgtgcatcgtcggaagccacgctgtcaatggagtggctaagattcattcagacatcgtgaaaacgaaggtgtttaaggacttctccgagctggagccagacaaattccagaacaaaactaatggcatcaccccgaggagatggcttctgctctgcaatccgggcctggcggaactgattgccgagaaaatcggggaagattatgtgaaggacctgtcacagcttactaagctgcattccttcctgggcgatgatgtgttcctcagagaactcgcgaaagtcaaacaggagaataaactcaagttctcccagttcctggaaaccgaatacaaggtgaaaatcaacccgtcctccatgttcgacgtccaagtgaagcgcattcatgaatacaaacggcagctgctcaactgcctgcacgtcattaccatgtacaaccgcatcaagaaggatccgaagaagttgttcgtgccacgcaccgtcattatcggaggaaaggcggctccgggctaccatatggcaaagatgatcatcaagctcatcacctcggttgcagatgtcgtgaacaatgacccaatggtgggatccaaattgaaggtgatcttcctggaaaactacagagtgagcctggcggaaaaagtcatccctgccacggacctttcagaacagatctcgaccgctggaactgaagctagtggaacgggaaacatgaagttcatgctcaatggagctctcaccatcgggactatggatggcgccaacgtggagatggcggaggaagcgggagaagagaatctgttcatctttgggatgagaattgacgacgtggcagcgctcgacaagaagggatacgaagccaaagagtattacgaggcactcccagagctgaaactcgtcatcgatcaaattgacaacggattcttctcgccgaaacagccagacctgttcaaggacatcattaacatgctgttttaccacgaccgctttaaggtgttcgccgactacgaggcgtacgtgaagtgccaggacaaagtgtcgcaactctacatgaacccgaaggcatggaatactatggtgctgaagaacatcgctgcaagcgggaagttctcgtccgacagaactatcaaagagtatgcgcagaacatctggaatgtggagccgtccgatctgaagatcagcctgagcaatgagtccaataaggtgaacggcaac

SEQ ID NO: 250828 - DNA, 2541 bp, synthetic construct
  misc_feature 1..2541: note = Description of Artificial Sequence: Synthetic coding sequence
  source 1..2541: mol_type = other DNA
atggctaagccactcaccgaccaagagaagagacgacagatcagcatccggggaatcgtcggagttgagaacgtagctgagctgaaaaagtccttcaaccgacacctgcacttcacactggtgaaagataggaacgtagctaccactagggattattacttcgctcttgcacacactgtgagggaccatctggtgggcagatggatccgcacccagcagcactattacgataagtgtcccaagagggtgtactacctgtctctcgaattttacatggggcgaacactccaaaacactatgattaatctgggtctgcagaatgcgtgcgatgaagccatttaccagctcggattggatattgaggagctggaggagattgaggaagatgctggtctggggaacgggggcctgggtcggctggccgcgtgcttcctggattcgatggcaactcttggcctcgccgcgtacgggtatggcatacgctatgaatatgggatctttaatcagaagatccgcgacggctggcaggtggaagaggcggatgattggcttaggtacggaaacccctgggaaaagagccgtccagagtttatgctacccgtacacttctacgggaaagtcgaacacactaacactggcactaagtggattgatactcaagtggttctcgccctaccttatgacacccctgtgccgggatacatgaataacaccgttaacaccatgcgcttgtggtctgcaagagcccccaatgactttaatttgcgcgactttaatgttggtgattatatccaggcggtcctcgaccgtaatctggctgaaaatattagccgcgtgctttaccccaatgacaactttttcgaaggtaaggaactgaggctgaagcaagaatatttcgtggtcgcagcaactctgcaggatatcatccgccgtttcaaagcctcgaagtttgggtcgacacggggggctggaaccgtgttcgatgcttttcctgatcaggtggccattcagcttaatgacacacatccagccttagccattccagagttgatgcggatcttcgtcgacatcgagaagctgccatggtccaaggcgtgggaactgacacaaaaaacgttcgcatacacaaaccatactgtccttcccgaggccttggagcggtggcctgtggatttagtggaaaaactgctgcccaggcatctggaaataatctatgagattaaccagaaacacctcgaccgcatcgtcgcgctgtttcccaaggatgtagaccggctccgacggatgtctctaattgaagaagagggaagcaaaagaattaacatggcacatttgtgcatagtgggaagccatgcggtaaacggagtagctaagatccattccgatatcgtcaagaccaaagtgtttaaggatttcagcgaactggagcccgataagttccaaaataagactaatggcattactccgcgacgctggctgctcttatgcaatcctgggttggctgaactgatagcagaaaagattggtgaggactacgttaaagacctgagtcaactgaccaagttgcatagtttcctgggagatgacgtttttctccgagaattggctaaagttaaacaagagaacaaactgaagttctcacagttcctggagactgagtataaggtgaaaattaatccttcttcaatgttcgacgtgcaagtcaaacggattcatgaatacaagcgccagctcttaaactgcctacatgtgatcactatgtacaataggatcaaaaaggatcctaagaaacttttcgtgccacggactgtcattattgggggcaaggcagccccggggtaccatatggctaaaatgatcattaaactcatcacaagcgtggcagatgtcgtgaacaacgatcccatggtaggctccaaactgaaagtgatcttcctcgaaaattacagagtctccttggccgaaaaagtcatccccgcgaccgatttgagtgagcagattagtactgcgggcacagaggcgtctgggacaggcaatatgaaattcatgctcaatggagccctgaccattggtaccatggatggggccaacgtagagatggcggaagaagctggcgaggagaatctgttcatttttggcatgaggatcgacgacgtggcggctctggacaagaagggatatgaggccaaggaatattatgaagccttgcctgagctgaaattagtcatcgaccagattgataacggattctttagtccgaaacagcccgacctgtttaaggacataattaacatgctcttttaccacgacaggttcaaggtgtttgcagactacgaagcgtacgttaaatgtcaggacaaggtcagccagttgtacatgaatccaaaggcttggaacaccatggtgctcaaaaacatcgccgcatccgggaaatttagctctgatcgcactattaaagagtacgctcagaatatctggaatgtggagccctctgacctaaagatctccttgagcaacgagagcaacaaggttaatgggaat

SEQ ID NO: 250829 - DNA, 2541 bp, synthetic construct
  misc_feature 1..2541: note = Description of Artificial Sequence: Synthetic coding sequence
  source 1..2541: mol_type = other DNA
atggcgaagccgctgacggatcaggagaagcgacgccagatctccatccgcggaatagttggcgtggaaaacgtggcagagcttaagaagtccttcaacaggcacctgcactttacgcttgtcaaggatcggaacgttgctaccacccgggactattacttcgcgctggcgcacaccgtgcgggaccacctggttgggcgctggatcaggacccaacagcattactacgacaaatgccctaagcgcgtgtactacctgagcctcgagttctacatgggaagaacgttgcaaaacaccatgattaatctgggtctgcagaacgcgtgtgatgaggccatctaccagcttggactggacatcgaagaactcgaggaaatcgaggaagatgctgggttgggaaatggcggcctcggacgcttggcagcttgcttcctggattcgatggcaactttgggactcgccgcctacggatacggcatccggtacgagtatggaatcttcaaccagaagattcgggacggctggcaggtggaggaggctgatgattggctgcgatacggcaatccctgggaaaagagccgaccagagttcatgctgcctgtacacttttacggaaaagtggaacacacgaacaccggcaccaaatggatcgatacccaggtggtgttggctctgccatacgacactcctgtgcccggttacatgaataacaccgtgaacactatgaggctgtggagcgccagagcgccgaacgacttcaatctgagagacttcaatgtgggggattacatccaggccgtactggaccgcaacctcgcagaaaacatcagtagggtcctctacccgaatgacaacttcttcgaaggcaaggagctgagattgaagcaagaatacttcgtcgtcgccgcaaccctccaggacatcatacggagattcaaagccagcaagttcggctcgacccgcggagccggaaccgtctttgatgcattcccagaccaagtggccatccagctgaacgacacgcaccctgccctcgccatcccggaactgatgcggatatttgtcgatatcgaaaagctgccctggtcgaaggcgtgggagctgacccaaaagactttcgcttacactaaccacaccgtgctcccggaggcgctcgaaagatggccggtggatctggtggagaagctgcttccgcgccacctggaaatcatctatgaaatcaaccagaagcacctcgacagaatcgtggcactgttcccgaaagatgtggatagactccggcgtatgtcattgattgaggaggagggtagcaaacgcatcaacatggcccacctgtgcattgtgggctcacatgccgtgaacggagttgctaagatccatagcgatatcgttaagactaaggtctttaaggacttctccgagctggagccggacaaatttcagaacaagactaatgggatcactccgaggcggtggctgcttctctgtaatccaggtctggccgagctgattgccgaaaagataggcgaggactacgtgaaggatttgagccagctcaccaaactccattcgtttctgggagacgacgtctttttgcgcgaattggcgaaggtcaaacaggagaataagctgaagttttcccagttcctggaaaccgaatacaaggtcaagattaatccgtcatccatgttcgacgtgcaagtgaagcgcattcacgaatacaagcgacagcttttgaactgtctccatgtaattaccatgtacaaccgcattaagaaggaccccaaaaaactcttcgtccctcggaccgtgatcatcggaggcaaagccgccccaggctaccacatggcaaagatgatcatcaagctcatcacttcagtggcggacgtggtgaataacgatccgatggtgggatccaagctgaaagtgatctttctggagaattacagagtttctttggcggagaaggtgatccctgccactgacctcagcgaacaaatctctaccgctggaacggaggcctcgggaaccggaaatatgaagtttatgctcaatggagctctgactatcggaactatggacggagcgaacgtcgaaatggcggaagaagcaggagaagagaatctgtttatcttcggcatgagaatcgacgacgtggctgccctggacaaaaagggttacgaagccaaagagtactatgaggcgctccccgaactcaagctggtgatcgatcaaatcgacaatggattcttctccccaaagcagccggatttgttcaaggatatcatcaacatgctgttctatcatgatcggtttaaggtgttcgcagactacgaggcctacgtcaagtgtcaagataaggtgtcccaactgtacatgaatcctaaagcctggaacaccatggtgctgaagaacattgctgcgagcggaaaattctcctcggataggactatcaaagaatacgcccagaatatctggaacgtcgagccgtccgacttgaagatctcactgagcaacgaatcgaataaggtgaatgggaac

SEQ ID NO: 250830 - DNA, 2541 bp, synthetic construct
  misc_feature 1..2541: note = Description of Artificial Sequence: Synthetic coding sequence
  source 1..2541: mol_type = other DNA
atggccaagcctctaactgaccaagagaagcgaagacagatctcaatcagagggatcgtgggcgtcgagaatgttgctgagctcaaaaaatccttcaatagacatctgcactttactctggtgaaggaccgcaatgttgccacaacccgcgactattattttgctctcgcacacaccgtccgcgaccacttggtgggacggtggattcgcacccaacagcactactacgacaagtgtccgaagcgtgtgtattacctctcactggaattttacatgggacgcaccctgcagaatacaatgatcaacctggggctgcagaacgcctgcgacgaagcaatatatcagctgggtctcgacattgaggaattggaggaaattgaagaggacgcagggttggggaatgggggcctggggcgtctggcagcctgtttcctggacagtatggctacgctgggattggccgcgtacggatacgggattcggtacgagtacgggatatttaatcagaaaatcagagacggatggcaagttgaagaggctgacgactggctgaggtatgggaatccctgggagaagtcgcggcctgaattcatgcttcccgtacacttctacgggaaagtcgagcacacaaataccgggaccaagtggatcgatacccaggtagtgttggccctcccgtatgacacgccggtgcccggctatatgaataacaccgtcaatacgatgcggctgtggtccgcaagggctcccaacgattttaacttgcgcgacttcaacgttggcgactatatacaagccgtgctggacagaaatctagccgaaaacatctccagagtattgtacccgaacgacaactttttcgaggggaaagaactgagactcaagcaggaatacttcgttgttgcggcgacactgcaggatattatccgacggtttaaggcgtctaaattcgggagcacccgcggagccggaactgtgtttgatgccttccccgaccaggtggctattcaactgaacgacacgcacccagctctggctatccccgagctgatgagaattttcgtagatatcgaaaagctcccatggagcaaagcctgggagctgactcaaaaaactttcgcctacacaaaccataccgttctgccagaagctctggaaaggtggccggtagatttggtggagaaattgctgcctcgccacctggagataatttatgagatcaatcaaaaacatctggatcggatagtcgcccttttccccaaggacgttgataggttgaggcgcatgagcctgatcgaggaagaggggtccaagagaataaatatggctcatttatgcatagtggggagtcatgctgtcaatggtgtggctaagattcattctgacatcgtaaagacaaaggtgtttaaggacttctctgaattggagccagacaagttccagaataagaccaacggaattacaccccgcaggtggctcctgctgtgtaatccagggttggccgaactgatcgctgaaaaaatcggtgaggattacgtgaaagatctgtcacagctcactaaactgcactcgtttttaggggacgacgtttttttgcgggagctggccaaggtgaagcaagaaaataagctaaagttctctcaattcctcgagacggagtacaaagtcaaaataaacccaagttctatgttcgacgtgcaggtcaagaggatccatgagtataaacgacagttgcttaattgccttcacgtgattaccatgtacaacagaataaaaaaggatccgaagaagctgtttgtgccacgcactgtgatcattggggggaaggccgctcccgggtaccatatggcaaaaatgatcataaaactcatcacctccgtggcggatgtggtcaacaacgaccccatggtcggtagtaaactgaaggtgatcttcctggaaaattatcgggtgtctcttgccgagaaagtgattcctgcaaccgacctcagcgagcagatatcaaccgcgggtacggaagcaagcggcacagggaatatgaaatttatgctgaatggtgctctcacaattggcaccatggacggcgcaaacgtggaaatggcagaagaagccggagaagagaacctgttcatcttcgggatgcggatcgatgacgtggcagccctcgacaagaaggggtatgaggcaaaagagtactatgaggccctcccagagctgaagcttgtcatagatcagatcgacaacggattcttcagcccaaaacagcctgacctttttaaagatataatcaatatgctgttctaccacgatagattcaaggtcttcgctgactacgaagcttacgtgaaatgtcaggataaggtatcccagctgtacatgaatccaaaggcttggaataccatggtgctgaagaatattgctgctagtggcaagttctcaagcgatcggaccatcaaagaatacgcacaaaatatttggaacgtggaacccagcgacctgaaaatttccctgtctaacgaatctaacaaggtgaacggcaac

SEQ ID NO: 250831 - DNA, 2541 bp, synthetic construct
  misc_feature 1..2541: note = Description of Artificial Sequence: Synthetic coding sequence
  source 1..2541: mol_type = other DNA
atggctaagcccctgactgaccaggaaaagagaagacagatcagtattaggggcatagtcggagttgaaaacgtggcagaactcaagaagagcttcaacagacacctgcatttcaccctcgtgaaagacaggaacgtagccacaacacgtgactactacttcgcgctggcccatactgtgcgagatcatctggttgggcgttggatcaggacacagcagcactactacgataaatgtcccaaacgagtgtactacctgagcctcgaattctatatgggccgaacactccaaaacaccatgatcaatctgggtttgcagaacgcgtgtgacgaggccatctaccagttggggctggacattgaagaactggaggagatcgaagaggatgccggactcggaaacggagggctcgggagactcgcagcctgctttcttgactccatggccacactcgggctcgctgcatacgggtacgggatacggtacgagtatggcattttcaaccagaaaatcagggatggttggcaagtcgaggaagcggacgattggttgcggtacggaaatccgtgggaaaagagcaggcccgaattcatgttacctgtgcacttttacggaaaggtggagcatacgaataccgggacaaaatggattgacacacaagttgttctcgccctcccttatgacacccctgtgcctgggtacatgaataataccgttaacaccatgagactttggtccgccagagctcccaacgacttcaatcttagggatttcaacgttggagactatatccaggctgtcctggaccgcaatctggctgagaacatatcccgggtgctctacccaaacgacaacttctttgagggcaaggaactgaggctcaaacaggagtacttcgttgtggccgccaccttgcaggacatcattcgcagatttaaagcctcgaagttcggatcaacacgtggagccggtacagtgtttgacgcattcccagaccaggtggccattcaattaaacgacacacatccagcgctcgctatccctgaattgatgcggatcttcgttgacatagaaaagttaccgtggtcgaaggcctgggaacttacccagaagactttcgcgtatacaaatcacactgtcctgcctgaagccctcgaacggtggccagtggacctcgttgagaaactgctaccgaggcacctagagatcatttacgagataaaccagaagcatctcgatcgcattgttgcacttttcccaaaggatgtcgatagactgaggaggatgtcattgattgaggaggagggatcaaaaagaatcaatatggcacacctgtgcatcgtgggttcccatgccgtgaacggcgtggctaagattcattctgacatcgtgaagactaaagtgtttaaagacttttccgaactggagccagataagttccaaaacaagaccaacggcatcacccctcgcagatggctattgctctgtaatccaggattggccgaactaattgccgagaaaataggagaagattacgtcaaagacttatcccagctaacgaagctgcattctttcctgggagatgatgtgttcttgcgagagctcgcgaaggtgaaacaagagaacaagctcaaattcagtcagttcctggaaacagagtataaagtcaaaatcaaccccagctctatgttcgacgtgcaggtaaagcgaatccacgaatataaaagacagctgctgaattgcctgcacgtcataactatgtacaacagaattaaaaaggacccgaaaaaacttttcgtgcctaggacagtgattattggaggcaaagcagcccccggataccatatggccaagatgattataaaactcataactagtgtggccgacgtggttaataatgatcctatggttggatctaaactcaaggtaatctttctggaaaactatcgggtatctctggccgaaaaggtgattcccgccaccgacttgtctgaacagatcagcacggcgggcacggaggccagcggaaccgggaacatgaaattcatgctcaacggcgccctgaccattggcactatggatggagccaacgttgagatggccgaggaagcgggagaagaaaacctgtttatatttggtatgcgaatcgatgatgtggccgctttggacaagaagggctacgaggccaaggagtattatgaggctctgccggaactcaaacttgtgattgatcagatagacaacggtttcttcagcccaaaacaaccagacctgtttaaagacattatcaacatgctcttttatcatgatcgattcaaggtttttgcagactatgaagcatacgtcaagtgtcaagacaaagtttcgcagttatatatgaatcctaaagcttggaacaccatggtactgaaaaatatcgctgcctctggaaaattctcaagcgacagaaccattaaagaatacgcacagaacatatggaatgtggagccctctgatctcaagatctccctgtctaacgaatcaaacaaggtcaacggcaat

SEQ ID NO: 250832 - DNA, 2541 bp, synthetic construct
  misc_feature 1..2541: note = Description of Artificial Sequence: Synthetic coding sequence
  source 1..2541: mol_type = other DNA
atggccaagccactgactgaccaggaaaagcgcagacagatctcgatccggggaatcgtcggcgtggaaaatgttgcagaactgaagaagtccttcaatcgccacttgcactttaccctggtgaaggatagaaacgtcgcgaccactcgcgattactattttgccttggctcacactgtcagggaccacctcgtcggacgctggatacgcacccagcagcactactacgacaagtgcccaaagagagtgtactacctgagcctcgagttttacatggggcgcaccctccagaacaccatgatcaatctcgggctccagaatgcgtgcgacgaggctatctaccagctgggactcgacatcgaggagctcgaggaaatcgaagaggatgccggactgggcaacggaggactgggacggttggcagcatgttttctggatagcatggctaccctgggcctcgctgcctacggctacggcatccggtacgagtacgggattttcaaccagaagatccgggacggatggcaagtggaggaagccgatgactggctgcgctatggaaacccctgggaaaagagtcgccctgagttcatgctgcccgtgcacttctacggaaaagtggagcacactaataccggcactaaatggatcgacactcaagtggtcctcgcgctgccgtacgacactcccgttccgggatacatgaataacactgtgaataccatgcggctgtggtcggcgcgcgccccgaacgatttcaacctcagagatttcaacgtcggggactatatccaagcagtgctggacaggaacctcgcggagaacatctccagagtcctgtacccgaatgacaacttctttgaaggcaaggagctgcgcctgaaacaagaatacttcgtcgtggcggctaccctccaagatatcattaggcggttcaaagccagcaaattcggatcaacccggggagccggcaccgtgtttgatgcgtttccagaccaagtcgcgatccaactgaacgatactcatccggcactggctattccggaactgatgagaattttcgtcgacatcgagaagctgccgtggtccaaggcttgggaacttacccaaaaaactttcgcctataccaatcacaccgtcctgccggaagcacttgagcgctggcctgtggacctggtcgaaaagctgctgccacggcacctggaaatcatctacgaaatcaaccagaagcacctggatcgcatcgtcgccctgtttccaaaggacgtggatcgcctgcgcagaatgtcgctcatcgaagaagagggaagcaagcgcatcaatatggcgcacctttgcatcgtgggttcgcatgcagtgaacggggtggcgaaaatccattcggacatcgtcaagactaaggtgtttaaagacttctcagaactcgagccagataagttccagaacaagaccaacggaatcactccgcgccggtggcttctcctgtgcaacccgggacttgcggaactgattgcagagaagatcggagaagattatgtgaaggacctgtctcagctgaccaaactgcactccttcctgggcgacgacgttttcctgagggaactggccaaagtgaagcaagagaacaaactgaagttcagccagttcctggaaactgaatacaaagtgaaaatcaatccctcgtcaatgttcgacgtgcaggtgaagcggatccatgaatacaaacgccaactgctgaactgcctgcatgtcatcaccatgtataaccgtatcaaaaaagatcccaagaagctgtttgtgccgagaactgtcatcatcggcggcaaagcggcgccaggataccatatggcaaaaatgatcatcaagttgatcacctcagtggcagacgtggtgaataacgacccaatggtcggttcgaagctcaaagttatcttcctggagaactaccgcgtgtcactggcggagaaagtgattcctgccactgaccttagcgagcaaatttcgactgcaggaaccgaagcatcgggcactggaaacatgaaattcatgctgaacggagccctcactatcggcacgatggatggcgcaaacgtggagatggccgaggaggccggagaggagaacctgtttatctttgggatgcggattgatgacgtggcagcactggacaagaagggatacgaagcaaaggagtactacgaggcgctgccagagttgaaactcgtgattgaccagattgacaacggtttcttttccccgaaacaaccggacctgttcaaggacatcatcaatatgctgttttaccatgacagattcaaggtgttcgcggactacgaagcatacgtgaagtgccaggacaaggtgtcccaactgtatatgaacccgaaggcgtggaacactatggtgttgaaaaacatcgcagcctcagggaagttcagctcggatcggaccattaaagagtacgcgcagaacatctggaacgtcgaaccgtcagacctcaagatctccctttcgaatgaatccaacaaagtcaatgggaac

SEQ ID NO: 250833 - DNA, 2541 bp, synthetic construct
  misc_feature 1..2541: note = Description of Artificial Sequence: Synthetic coding sequence
  source 1..2541: mol_type = other DNA
atggcaaaacctttaaccgatcaagaaaagcgcagacagatcagcatccgaggcatcgtgggcgtcgaaaacgtcgcagaactgaaaaagtcatttaaccgtcatctgcacttcaccctggtgaaagatcgtaatgtcgccacgacacgggactactatttcgcgctggcacacaccgtaagggaccatcttgtaggtcggtggataaggacgcaacaacactattatgacaagtgccctaagcgtgtctactatctctccctggaattctacatggggcggacactccagaataccatgatcaacctgggactccaaaacgcttgtgacgaagctatttatcaacttgggttagacatcgaggaacttgaagagatagaggaggacgctgggctcgggaacggaggcctgggacggctagccgcatgctttctggacagtatggctacattggggctagcagcatatggttacgggatccggtatgaatatgggatctttaatcaaaagattcgggacggctggcaggtggaggaggctgatgattggctgcggtatggcaacccctgggaaaagtccaggccggagtttatgttgccggtacacttctatgggaaagttgagcacacgaatactggtaccaagtggatcgacacccaggtcgtgctagctctgccctacgacacacccgtgcctgggtatatgaataatactgtcaacactatgagattatggagcgcccgtgcccccaacgacttcaaccttagggatttcaatgtaggggattatatccaagctgttctggaccggaatctggcagagaacatttctcgcgtgctctatccaaacgataactttttcgagggcaaggaacttcggctgaagcaggaatattttgtggtggcggcaaccctgcaagatattatccgacgatttaaggcaagtaagttcggttcgactagaggcgccggcaccgtgtttgatgcctttcccgatcaggtggccattcaactgaacgacacacatcccgccttggcaattcctgagctgatgcgcatattcgttgatattgagaaactcccttggagcaaggcctgggagctgacgcagaagacattcgcctatactaatcacaccgtgctgcccgaggctctggagcggtggccagtggacttggttgagaagttactgccccgccatcttgagatcatttacgagataaaccagaaacaccttgatagaattgtcgcgttgtttcccaaggacgtggataggctgcgtaggatgagcttgattgaggaggaggggagtaaaagaatcaacatggcgcacctgtgtattgtcggctcccacgccgtgaatggcgtggccaagatccacagtgacattgtgaagaccaaagtcttcaaagatttttctgagctggagccagacaagtttcagaacaagacgaatggaattactccacggcggtggctcctcctctgtaaccctggtctggcggagctgatcgcggaaaaaatcggtgaagattatgtcaaggacttgagccagctgaccaagctccattccttcctgggagatgacgtgtttcttcgagaactcgcaaaggtgaagcaagaaaacaagttaaagttctcccaatttttggagactgagtacaaggtgaaaatcaacccctcatccatgtttgatgttcaggtcaagagaatccatgaatacaagcggcaactcctgaattgtctacatgtgatcaccatgtacaataggataaaaaaggatccgaaaaagctttttgttccacggacagtcattattgggggcaaagcggcccctggctaccatatggctaagatgatcatcaaactcattacctcagtcgctgacgttgtgaataacgatccaatggtgggcagcaaactgaaggtgatttttctggaaaactatcgcgtgagccttgcggagaaagtcatccccgcgactgacctgagcgagcaaatcagtactgctggaactgaggcaagtggcaccgggaacatgaaattcatgctaaatggagctttaaccataggaaccatggatggagctaatgtggaaatggccgaggaggctggagaggagaacctgttcatctttggaatgcgaatcgacgacgtggctgcactcgacaagaagggatacgaagccaaggagtactacgaggcactgccggagctgaagttggtcatcgaccagatagacaacggcttcttttctccaaagcaacccgacctatttaaggacattattaatatgctcttctatcacgacaggtttaaagtgtttgccgactatgaggcttatgtcaagtgtcaggataaagtgtctcagttatacatgaacccaaaggcctggaataccatggtgttgaagaacatcgctgcctccggaaaattctcgtctgatagaactatcaaggagtacgcacagaacatatggaacgttgagcccagcgatttgaagatttctttgtcgaacgaaagcaataaggtgaatggcaat

SEQ ID NO: 250834 - DNA, 2541 bp, synthetic construct
  misc_feature 1..2541: note = Description of Artificial Sequence: Synthetic coding sequence
  source 1..2541: mol_type = other DNA
atggcgaagccactgaccgaccaggaaaaacgcagacaaatctccatccgcgggatcgttggagtcgagaatgtggctgagctcaagaaatccttcaaccggcacctgcacttcactctggtgaaggacagaaacgtggccaccaccagagactactacttcgcgctcgcccacactgtcagggaccatctggtgggccgatggatccggacccagcaacattactacgacaaatgtcctaagcgggtgtattacctctcgctggagttttacatgggccggaccctgcagaacaccatgatcaacctgggattgcaaaatgcatgcgatgaagcgatttaccagctgggactggatatagaggaactcgaggagatcgaagaggacgcgggactgggaaacgggggcttgggacgcctggcagcgtgcttcctcgactccatggcaaccctgggtttggccgcctacgggtacggaattagatacgaatacggcatcttcaaccagaaaatcagggatggatggcaggtggaagaagcggacgactggctccggtacggcaacccatgggaaaagtctcggcccgagttcatgctgccggttcacttctacggaaaagtggaacacactaacaccggaaccaaatggatcgacactcaagtggtcctcgcgctcccgtacgacactccggttcctggttacatgaacaatacggtgaacacgatgcgcctgtggtcggcgcgcgccccgaacgacttcaacctgcgggatttcaatgtcggagattacatccaggctgtcctcgacagaaatctggcggaaaacatctcccgcgtgctctatcctaatgacaatttcttcgaaggcaaggagctgcgcctcaaacaggagtacttcgtggtggcggccacgctgcaagacatcatccgccgctttaaggcgtccaagtttggatcgaccagaggcgccgggaccgtgtttgacgcctttccggaccaagtcgcgatccagctcaacgacacccatcccgccctggcaatcccggaactgatgcgcatcttcgtggacatcgaaaagctgccctggtccaaggcctgggagttgacccaaaagacttttgcgtacaccaaccacactgtcctgcctgaagcgctggagagatggccagtcgacctcgtagaaaagctcttgccgagacacctggaaatcatctacgagattaatcaaaagcatcttgaccgcatcgtcgctctgttcccgaaggatgttgaccggctgcgccggatgtccttgatcgaggaggagggatcgaagcggatcaacatggcccatctctgcattgtgggatcacacgcggtgaacggggtcgccaagatccactcggacatcgtgaaaaccaaggtctttaaggattttagcgagctggaacctgacaagttccagaacaagaccaacggaattaccccacgccgctggctgttgctttgtaatcctggtctggccgagctgatcgcggaaaagatcggggaagattacgtgaaggacttgtcccaactgactaagctccactcgttcctgggagatgacgtgttcctgcgggaactggccaaagtgaagcaggagaataaactgaagttcagccagttcttggaaaccgaatacaaggtgaagatcaatccatcgtcgatgtttgacgtccaagtgaagcgcatccacgagtacaagcggcagctgctgaactgcctccatgtgatcaccatgtacaatagaattaagaaggatccaaagaaactgttcgtgccgcgcactgtcattatcggaggtaaggccgccccgggataccatatggcaaagatgatcatcaaactgattacttcagtggcggatgtggtgaataacgacccgatggtcgggtctaaacttaaagtcatcttcctcgagaattaccgggtgagtctcgctgagaaggtcatccccgctactgacctgagcgaacagatctcaaccgcaggaaccgaagcctctggaaccgggaatatgaagttcatgctcaacggagccttgaccatcggaaccatggacggggccaatgtggaaatggcggaagaagcaggggaagaaaacctgttcattttcggaatgagaattgacgacgtggcggcactcgacaaaaagggatacgaggccaaggaatactacgaggccctccctgagttgaaacttgtgatcgaccagatcgataacggattcttctcaccgaagcagccggacctcttcaaggacattatcaatatgctcttctaccacgacagattcaaggtgttcgctgactacgaggcatatgtgaagtgtcaggacaaagtgtcacagctctacatgaaccccaaagcctggaacacgatggtgctgaagaatatcgccgcatccggaaaattctcaagcgatcgcaccatcaaagagtacgcccaaaacatctggaacgtggagccgtccgacctgaagatttcgctctctaacgaatcgaacaaggtgaacggaaat

SEQ ID NO: 250835 - DNA, 2541 bp, synthetic construct
  misc_feature 1..2541: note = Description of Artificial Sequence: Synthetic coding sequence
  source 1..2541: mol_type = other DNA
atggctaagcccttgactgaccaggaaaagcgcagacagatttccatacggggtattgttggagtggagaacgtggctgagcttaaaaaatcattcaacagacacctccacttcaccctggtgaaagacaggaatgttgccaccacacgcgactactattttgcattggctcacacggtgagagatcacctagtgggtcggtggataaggactcagcaacactactatgacaagtgtcctaagcgcgtgtattacctgagtcttgaattctatatggggaggacccttcagaatactatgattaatttgggacttcagaacgcttgtgatgaggcaatttaccaactgggtcttgatattgaagagctggaggagatcgaagaggatgctggcctgggcaacggcggcctaggccggctggccgcctgttttctggatagtatggccactttgggcctggcagcatatggatatggcatacgatacgaatacggaatcttcaatcaaaaaataagagacggatggcaggtggaagaggcagatgactggctgcgatacggtaacccttgggagaaaagtcgccctgaattcatgctccccgtccatttctacggaaaggtggaacacaccaacactgggactaagtggatcgatacccaggtggtcctggccctcccttatgacacaccagtgcctggttacatgaacaacactgtaaatactatgagactgtggtcagcgagagcgcccaatgatttcaatttgagagacttcaatgtaggggattacatacaggctgttctggaccgcaacttggccgagaatatcagccgcgtactgtacccaaatgataacttcttcgaagggaaggagctacgcctgaagcaagagtacttcgtcgtggccgctactctgcaggatattattcgaagatttaaggcgtccaagttcggtagcacacgtggcgccggtaccgtgtttgacgcttttcctgatcaagtggccattcagctgaatgacactcatcccgcgctcgccattccagagctaatgaggatctttgttgacatcgaaaagctcccctggtccaaggcctgggaactgacccaaaaaacgtttgcatacacaaaccacaccgttctgcctgaggccttggaacgctggcccgtggacctggtagagaagctgctgccacgacacctggagatcatctatgagatcaatcagaagcatctggaccggatcgttgcactcttccctaaggacgtggatcgcctgcgccggatgtcccttatcgaagaggaaggatccaagaggattaatatggcccatctatgcatcgttgggtcacacgctgtgaacggagtggccaagattcatagtgatattgtcaaaacaaaagtgtttaaggacttctccgagctggagcccgacaaattccaaaacaaaaccaatggcattaccccacgtcggtggcttttgctgtgtaacccaggtctcgccgaactaatcgccgagaagattggcgaggactacgtcaaagacctcagtcagttgacgaagctccattccttcctgggtgacgatgtcttccttcgggagctcgccaaagtgaagcaggagaataaacttaagttttctcagtttctggagacagagtacaaagtgaagataaatccttcatcaatgttcgacgtgcaagtaaaaaggattcacgaatataagaggcagttgttgaattgtttgcatgtgattactatgtataaccggatcaaaaaggaccccaagaagttgttcgtaccacggacggtcattatcggcggaaaagcagcaccagggtaccatatggccaagatgatcatcaaacttatcacatctgtggctgacgtggtcaacaatgacccaatggtgggtagcaaattaaaggtaatctttctggaaaattatcgcgttagtcttgccgagaaagtcatcccggcaaccgatcttagcgaacagatctccacagcgggcactgaagccagcgggaccggaaatatgaagtttatgttgaatggcgccctaactatcggaaccatggatggcgcgaatgtggaaatggcagaagaagccggagaggagaacctgttcatcttcggaatgcggatcgatgacgtagcggccctagacaagaagggctacgaagccaaggaatactacgaggcgttgcctgagttgaagctcgtgatcgaccagatcgacaatggcttctttagtcccaaacagccagatctgtttaaggacatcattaacatgcttttctaccatgatcgctttaaggtattcgctgactatgaagcatacgttaaatgccaggacaaggtatcccagttgtacatgaatccaaaggcgtggaataccatggtacttaagaatattgcagcctcaggaaaattctccagcgacaggactataaaggagtatgcacagaacatctggaatgtcgaaccctcagacctgaagatcagtctctctaacgaatcaaataaagtcaatggcaac

SEQ ID NO: 250836 - DNA, 2541 bp, synthetic construct
  misc_feature 1..2541: note = Description of Artificial Sequence: Synthetic coding sequence
  source 1..2541: mol_type = other DNA
atggcgaaacctctgacagatcaagagaaaagacgccagatcagcattaggggcatagtaggggtcgagaatgttgcagagctcaaaaaatctttcaaccggcatctccatttcacattagtgaaagatcgtaatgttgcaaccactcgtgactactactttgctttagcacatactgttcgggaccatctggtcggacgctggattagaacacaacagcactattatgataagtgtcccaaacgagtgtattatttatcattagaattctacatgggtagaacacttcaaaacactatgataaatttgggactccagaatgcctgcgacgaagcaatctatcagctaggacttgatatcgaagaattggaggaaatcgaggaagatgcgggattgggcaatggcggacttggccgtctggcagcctgctttctagattctatggctacgttagggctggctgcttatggctatggtatcagatatgaatatggcatctttaatcaaaagatccgcgacggctggcaagtggaagaggcggacgattggcttagatatggaaacccgtgggaaaagagtcgccctgaatttatgctgcctgtgcacttttatggcaaggtcgaacatacaaacacgggcacaaagtggatcgatacacaagtcgtgctggccttaccttacgatacgcctgtcccgggctatatgaataataccgtgaatacgatgagactgtggagcgcgcgcgctccgaatgacttcaatctgcgggatttcaatgtcggtgattatattcaggccgtgctggataggaatctggccgagaatatatctcgggtgttatacccgaatgataatttttttgaggggaaagaactgagactgaaacaagagtatttcgtcgtggcggcgacattgcaagatattatccgcagattcaaggcttcaaaatttggatctacgcgaggagctggcactgtctttgacgcttttccggatcaggtcgcgatccagctcaatgatacacatcctgctctcgctattccggaactcatgcgtatttttgtggatatcgaaaaattaccgtggtctaaggcttgggaattaacccaaaagacgtttgcatatacgaatcatacagttctcccggaggcacttgaacgttggcccgtagatctggtggaaaaattactgccgagacacctggaaattatatatgagatcaatcaaaaacatctagaccgcatagttgcgctcttcccgaaagacgtcgatcggttgagacgcatgtcactgattgaggaggagggcagtaagcgcatcaacatggctcatttgtgtatcgtcgggagccatgccgtaaacggtgttgcgaagatccattctgatatagttaaaactaaagtcttcaaggatttctctgaactagaaccagataaattccaaaataaaacgaatggcatcaccccaagacgttggctacttctatgcaatccgggacttgcagaacttattgcagaaaaaataggtgaggactatgtgaaagatcttagccaacttacaaaactgcatagcttcctgggcgatgatgttttcctcagggaactcgcgaaagtgaaacaggagaacaaactgaaatttagtcaatttctcgagacagagtacaaggtcaagatcaatccgagtagcatgtttgacgtccaggtaaagagaattcatgaatataaaagacagctattaaactgtcttcatgtaatcacgatgtacaaccgcatcaaaaaagatcctaaaaaacttttcgtgcctcgcacagtgattatcggaggaaaagcagccccgggataccatatggcgaagatgattatcaagttgataacttccgttgctgatgtagtcaacaatgatccaatggttggctcaaaacttaaggtgattttccttgagaactatagagtttcgttggcggagaaagtcatacctgccaccgatctttcggaacaaatttctaccgctggaaccgaagcgtcgggcacgggaaacatgaaatttatgctgaacggagccttgacaatcggtacgatggatggcgcaaatgttgaaatggctgaagaagctggcgaagaaaatctttttatctttgggatgagaattgacgacgttgccgcacttgataaaaagggttatgaggcgaaagagtattacgaagctctgcctgaattgaaattggtcattgatcagattgataacggcttctttagtccgaagcagcctgatttgtttaaagatatcattaacatgttattttaccatgatcggtttaaagtgttcgccgattatgaggcatatgttaaatgtcaggacaaggttagccagctttatatgaaccctaaggcttggaacacaatggttctaaagaacatcgccgcttcaggcaaattttctagtgaccggaccataaaagagtatgctcaaaacatttggaatgttgaaccatctgatcttaagatctctttaagcaatgaaagcaataaagttaatggaaac

SEQ ID NO: 250837 - DNA, 2541 bp, synthetic construct
  misc_feature 1..2541: note = Description of Artificial Sequence: Synthetic coding sequence
  source 1..2541: mol_type = other DNA
atggctaaacctcttactgatcaagaaaaaagaagacaaattagtataagaggtattgtgggggtcgaaaatgttgcagaattaaaaaaatcttttaatagacatttgcattttactttagttaaagatagaaatgtcgccacaacacgtgattattattttgcattagctcatacagttcgtgatcatttagttggtaggtggattagaacacaacaacattattatgataagtgtccaaaaagagtatattatttatcattagaattctatatgggtagaactttacaaaatacaatgattaatcttggtcttcaaaatgcatgtgacgaagcaatttatcaattaggattagatattgaagaattagaagaaattgaagaggatgcaggtttgggaaatggaggattaggtagacttgctgcttgttttcttgattcaatggcaacattaggattagctgcatatggatatggtataagatatgagtacggaattttcaatcaaaaaattcgagatggttggcaagttgaagaagctgatgattggcttagatatggtaatccatgggagaaaagtagaccagaatttatgttaccagttcatttttatggaaaggttgaacataccaatactggaacaaaatggattgatactcaagtagtacttgcacttccatatgatacacctgttcctggatatatgaataatacagttaatacaatgagattatggtcagctagagcaccaaatgattttaatcttagagattttaatgttggggattatattcaagcagtattagatagaaaccttgctgaaaatatatctagagttctttatccaaatgataatttttttgaaggtaaagaacttcgtttaaaacaagaatatttcgttgtagcagctacacttcaagatataatacgaagatttaaagcatcaaaattcggatcaactagaggtgctggaacagtttttgatgcatttccagatcaagttgcaattcaattgaatgatacacatccagctttagctattccagaattaatgagaatatttgttgatattgaaaaacttccttggtctaaagcatgggaattaacacaaaaaacatttgcatatacaaatcatacagtacttccagaagcacttgaaagatggccagttgatcttgtcgaaaaattacttccaagacatctagaaataatctatgaaataaaccaaaaacatttagatcgaattgttgctctttttcctaaagatgtagatagacttagaagaatgtctttaattgaagaagagggatccaaaagaattaatatggcccatttatgcattgttggatcacatgctgttaatggagttgcaaaaattcacagtgatattgtgaaaactaaggtatttaaggattttagtgaattagaaccagataaatttcaaaataaaactaatggaataactcctagaagatggttattgttatgtaatccaggattagcagaattaatagctgaaaaaataggggaagactacgttaaagatttgtcacaattaactaagttgcattcatttttgggagatgatgtattccttagagaattagcaaaagtaaaacaagaaaataaattaaaattttcacaatttcttgaaacagaatacaaagtaaaaattaatccatcatcaatgttcgatgttcaagttaaaagaattcatgaatataaaagacagttattgaattgtcttcatgttattacaatgtataatagaattaaaaaagatccaaagaaattgttcgttccaagaacagtgataattggtggaaaagctgcaccaggatatcatatggctaaaatgataattaaacttataacttcagttgcagacgttgttaacaacgacccaatggtaggatccaaacttaaggttatttttttggaaaattatagagtttcattagcagaaaaagttattccagcaacagatttatctgagcaaattagtactgcaggaactgaagcatcgggaacaggaaatatgaaatttatgttaaatggagctttaacaattggaactatggatggagctaatgttgaaatggctgaagaagcaggagaagaaaatttatttatttttggtatgagaattgatgatgttgcagctcttgacaagaaaggttatgaagctaaggaatattatgaagcattaccagaattaaaattagtaattgatcaaattgacaatggtttttttagtccaaaacaaccagatttatttaaagatattattaacatgttattttatcatgatagatttaaggttttcgctgattacgaagcttatgttaaatgtcaagacaaagtttcacaactttatatgaatccaaaagcatggaatactatggtgttaaagaatattgcagcttctgggaaatttagtagtgatagaacaattaaggaatatgcccaaaatatctggaatgtagaaccatcagatttaaaaattagtctttcaaatgaatcaaacaaagttaacggtaat

SEQ ID NO: 250838 - DNA, 2541 bp, synthetic construct
  misc_feature 1..2541: note = Description of Artificial Sequence: Synthetic coding sequence
  source 1..2541: mol_type = other DNA
atggctaagccgttgaccgaccaggagaagagacgccagatctccattcgcggaattgttggagtggagaacgtggctgaactgaaaaagagtttcaatcggcaccttcatttcaccctggtgaaagacaggaatgtagccactacacgcgactattatttcgctctcgcccacacagtgcgggatcatctcgtgggccgatggattcgcacccaacaacattactacgacaagtgccctaagcgcgtctattatctctccctggagttctatatggggagaactcttcaaaacacaatgattaatctgggcttgcaaaatgcttgtgacgaggccatctaccaacttggtctggacatcgaggaacttgaggagattgaggaggacgctgggctcggcaatggcggactgggtaggctggctgcttgttttctcgattcaatggccactctggggctggctgcgtatggatatggtatcagatacgaatatgggatattcaatcaaaagattagagatgggtggcaggttgaagaagctgacgattggctgaggtacggcaacccttgggaaaaaagccggcctgagtttatgctgcctgtacatttctatgggaaggtggagcatactaacacggggaccaaatggatcgacacacaggtggtgctggcactgccatatgacacccccgtgcctggttacatgaacaacacagttaataccatgagactctggtctgctcgagcccccaacgattttaacctccgggatttcaacgtgggcgactacatccaagcagtgctcgatcgcaatttggccgagaacatcagcagggtgctttacccaaacgataatttttttgaaggcaaagagctgcgacttaaacaggaatatttcgtggtggcagctacattgcaggacatcatccggagattcaaggccagcaaattcggatccacaagaggtgcaggaacagtgttcgacgccttcccagaccaggtggccatacagctcaacgatacccatcctgctttggccatccccgagctgatgagaatcttcgtagacatcgagaaactcccatggagcaaggcttgggaactgacccaaaaaacgtttgcttatactaaccacaccgtgttgcctgaggcactggaacgatggcctgtcgacctggtggagaagctcctgcctcgccatctcgaaatcatctacgaaattaaccagaagcacctggaccggatagtggctctgttcccaaaggatgtggatcggttgcgaagaatgtccctgatcgaagaagaaggcagcaagcgcatcaacatggcgcacctctgcatcgttgggagccacgcagtgaacggggttgctaaaatccatagcgatatagtgaaaacgaaagtctttaaagacttctctgaactcgagcccgacaagttccaaaataagacaaatggaataaccccccgcagatggctgctcctgtgcaatcccggactggcggaactgatcgctgaaaagatcggagaagattacgtgaaggatctctctcaactcacaaaattgcactcctttttgggagacgacgtgttcctgagggaactggcgaaggtgaagcaggaaaacaaactgaagttcagtcaatttctcgagacagaatacaaggtgaagattaatcccagtagtatgttcgacgtgcaggtgaaaaggattcacgaatacaagagacagcttttgaactgcctccacgtcattaccatgtacaacaggatcaaaaaggaccctaagaaactgtttgtgcctaggactgtcattatcggtggcaaggcagccccaggataccacatggcgaaaatgatcattaagctgatcacatcagtggccgacgtcgtgaataatgaccccatggtgggatccaagctcaaggtcatctttctcgagaattaccgggtgtctttggccgagaaggttattcctgccaccgatctttccgagcaaatttcaacagctggaaccgaagcctccggtactggaaacatgaagttcatgctcaatggggctcttacaattggaacaatggatggtgccaacgtggaaatggccgaggaggccggagaggagaatttgttcatcttcggaatgagaatcgatgatgtggcagcccttgataaaaaagggtatgaagcgaaggaatactatgaggcactgcctgagctgaagcttgtcatagatcagatcgacaacgggttttttagcccgaagcagccagatctgttcaaggatatcatcaatatgctgttctatcatgatcgctttaaagtcttcgccgattatgaagcctacgtgaagtgtcaagacaaggtgtctcaactgtacatgaaccccaaggcttggaacacaatggtcctcaagaatatagccgcatctggaaaattttccagcgataggactatcaaggagtacgcccaaaacatctggaatgtggaaccctccgatctgaagatctcattgtccaacgagtctaacaaggttaacgggaat

SEQ ID NO: 250839 - DNA, 2541 bp, synthetic construct
  misc_feature 1..2541: note = Description of Artificial Sequence: Synthetic coding sequence
  source 1..2541: mol_type = other DNA
atggcaaagccgctcaccgatcaggagaagaggaggcagatatcaatcagagggatagtcggcgtggagaatgtggcagaacttaagaaaagctttaaccgacacctacatttcaccctggtgaaggatcgcaacgtcgcaaccacgagagattactacttcgccctagcccacaccgtgcgtgatcatttggttgggcgctggatcaggacgcagcaacactattacgacaagtgcccaaagcgagtctactacctcagtcttgagttctatatgggaagaacactgcagaacaccatgatcaatctggggctccagaatgcgtgcgatgaggctatctatcagttgggcctggatatcgaggaattggaggaaattgaggaagacgcaggtctgggcaatgggggcctgggacgcctcgccgcttgcttcttggacagcatggccacgcttggcctcgctgcttatggctatggaatccgctatgagtacgggattttcaatcagaaaattagggacggttggcaggtcgaagaagcggatgactggcttagatacggtaatccctgggaaaagtcacgaccagaattcatgctcccagtgcatttttacggcaaagtagagcacacgaacaccggtacgaagtggattgatacccaggttgtactcgcactgccgtacgatacccctgtgcctgggtatatgaacaataccgttaacacaatgcgcttatggtctgcccgcgctcctaacgatttcaacctgcgtgacttcaatgtgggggactacattcaggctgtgctggaccgcaacctcgctgaaaatattagcagggtgctctaccctaacgataattttttcgaaggaaaggaattgcggctcaaacaggagtacttcgtcgtcgcagccaccctgcaagatataattcggaggttcaaagcaagtaaatttggtagtactcgcggggcaggcactgtgttcgacgcatttccagaccaggtggccattcagctgaacgacacccacccggcacttgccataccggaattgatgcgcattttcgtcgacattgaaaaattgccatggagcaaagcctgggaacttacccaaaagacttttgcctatacgaaccatacagtactgccagaagccttggaaaggtggcctgtagaccttgtggagaagctgctgcctcgtcatctggagatcatttatgaaatcaaccaaaagcatctggacaggatcgtggccctctttcctaaggatgtggataggctccgcagaatgtcgcttattgaggaggaaggttctaaacgcatcaacatggcccatctgtgcatcgtaggcagccacgctgtaaacggcgttgctaagatacattccgacatcgttaaaactaaggttttcaaggatttctccgagctggagcccgacaagttccagaataagaccaatggcattacaccaaggcgatggctgctgttgtgtaaccctggcttagctgagctcatagctgagaagattggggaggattacgtgaaggatctttcgcagctgaccaaattgcactcattcctcggtgatgatgtatttctgagggaattggcgaaagttaagcaagagaacaaacttaaattctcccagttcttggaaacagagtacaaagtgaagattaatccgtcaagcatgtttgatgtacaagttaaacggatccacgagtacaaacgccagctcctgaattgcttgcacgtgattactatgtacaatcggatcaagaaggatccaaagaagcttttcgtgccgagaacggttatcatcggagggaaggcggcgccaggttaccatatggcaaagatgatcataaaactcatcaccagcgttgcggacgtggtgaacaacgacccaatggtgggaagtaagctgaaagtgattttcttggagaattaccgggtctcattggctgagaaggtcataccagcaaccgacctgagcgagcaaatcagtacggcaggcaccgaagcctctggaacaggcaatatgaagtttatgttaaatggagctcttacgattggaacgatggatggggccaacgtcgagatggccgaggaggccggcgaggagaatctttttattttcggaatgcgaatcgatgacgtggccgccctggataagaagggctacgaggccaaagagtattacgaggccctgcctgaactcaagttagtgattgatcagattgataacgggttcttcagtcccaaacaacctgatctgtttaaagatatcattaatatgctcttctaccatgatagattcaaggttttcgcagactatgaagcatacgttaaatgccaagataaggtcagtcagctttatatgaaccctaaggcttggaataccatggtgctaaagaatattgcggcttccgggaagttcagtagtgacagaactatcaaagagtatgcacagaatatctggaatgtggaacccagtgacctcaagatcagcctatcaaatgagtccaataaggttaacggcaat

SEQ ID NO: 250840 - DNA, 2541 bp, synthetic construct
  misc_feature 1..2541: note = Description of Artificial Sequence: Synthetic coding sequence
  source 1..2541: mol_type = other DNA
atggctaagcccctcacggaccaggagaagcggagacagatatcaatcaggggcattgtgggcgtggagaatgtggcagagctcaaaaaatccttcaacagacatctgcatttcactctcgtcaaagacagaaatgtggccacaacccgagactattacttcgccctggcgcacacagttcgggaccatctggtcggcagatggatacgaactcagcagcattactatgacaaatgccccaaaagggtgtattacctctctcttgagttttatatgggaaggacattacaaaataccatgataaatttgggcctgcagaatgcttgtgacgaagccatctaccagttagggctagacatagaggaacttgaggagatcgaggaagatgctggcttggggaatggcggcctggggagattggctgcctgctttctcgattcaatggccacactgggcctggccgcatatgggtatggcatcagatacgaatacggtatcttcaatcaaaagatccgagacggatggcaggttgaggaggcagacgactggctccgctacggcaatccgtgggagaagagccgacccgaatttatgctcccagttcacttttatggcaaagtggagcatacaaatacaggaacaaagtggattgatacccaggtagtactcgctctgccttatgatacgcctgtccctgggtatatgaataacaccgtgaacacaatgcgactctggtccgcccgggcacccaatgactttaacctgcgcgactttaatgttggcgattacattcaggccgtgctggatcgcaacctcgctgaaaatatttcccgtgtactgtaccccaacgacaactttttcgaaggaaaggaactgagactaaaacaggaatacttcgtagtagccgctactcttcaggacatcattaggcggttcaaagcgtccaagtttggctctacccgaggggcaggaacggtatttgacgcctttccagaccaggtggcgatccagctgaacgacacacaccccgcattggcaattccagaactgatgagaatatttgtggatatcgagaagctcccgtggtccaaggcatgggagctcacccagaagaccttcgcatacaccaaccacaccgtattaccagaagcacttgaacggtggccagtggacctcgtggagaaactcttaccccggcaccttgagatcatctatgaaatcaaccagaaacaccttgaccggattgtggcgttgttcccgaaggacgtggaccgactacgaaggatgtctctcattgaggaagagggcagtaaaaggataaatatggcccatttatgcattgtcggctcgcacgctgtcaacggcgtggcgaagatccattccgacattgttaaaacgaaggtcttcaaagatttcagcgagttggaacccgacaaattccagaacaagactaacggcatcactcctcgcaggtggctgctgctctgcaatccagggctggcggaactcatcgctgagaagattggcgaggactacgtcaaggatctttcccagcttaccaagttgcattcattcctcggcgatgacgtatttcttagggaacttgccaaagttaagcaggaaaataagctaaagttcagccagtttctggaaaccgagtacaaggttaagattaatccctcaagcatgttcgatgtccaggtgaaaaggattcatgaatataagaggcagctgctgaactgcctgcacgtgattaccatgtacaataggataaagaaagaccccaagaagttgtttgtgcctcgcactgttatcattggcggtaaggctgccccaggctatcatatggcaaagatgatcataaagctgattactagcgtcgctgacgttgtcaataacgatcccatggtgggaagcaaactcaaggtaatcttcttggaaaattacagagtcagcctggccgagaaagtcatcccagccaccgatctgtccgaacagatttctacagccggaaccgaagcctcagggaccggcaatatgaagtttatgctcaatggcgccctgactatcgggacaatggatggtgcgaatgtggagatggcggaagaggcaggggaggagaatttgttcatctttggtatgcgtatcgatgatgttgccgctctcgacaaaaaaggctatgaggctaaagaatattatgaagctctgccagagctgaaactcgttattgatcagatcgacaatggtttcttttctcccaagcagcctgatctgttcaaggacataatcaatatgctgttctaccacgaccggtttaaggtcttcgctgattacgaggcatatgtgaagtgccaggataaggtatctcagctgtatatgaaccctaaagcttggaacactatggtgctcaagaatattgcggcttccggcaaattttcctctgatcgcaccatcaaagaatacgcacagaacatctggaatgtggagccaagtgacctgaaaatctcactgagcaatgaatcaaacaaagtcaatggcaac

SEQ ID NO: 250841 - DNA, 2541 bp, synthetic construct
  misc_feature 1..2541: note = Description of Artificial Sequence: Synthetic coding sequence
  source 1..2541: mol_type = other DNA
atggcgaagccgctgacggaccaggagaagcgcagacagatatctatccgggggattgttggggtcgaaaatgtcgccgaactgaaaaaaagcttcaaccggcatctgcactttacactggtgaaagacaggaatgtggctacaacaagagactattattttgcactggcacacactgtgcgcgaccaccttgtgggtcgctggattcgcacccagcagcactattacgacaaatgtccaaaaagggtgtactacctaagcctcgagttttatatgggtaggaccctccagaatacgatgattaaccttggattgcagaatgcttgcgacgaggcaatttaccagctcgggctagacatcgaggaactggaagagattgaggaagacgcaggactgggaaacgggggcctcggtagattagccgcgtgctttctcgattccatggcaacgttaggcctggcagcttacggttacgggatacgctacgagtacggcattttcaaccaaaaaattagagatgggtggcaggtggaggaagctgatgactggctgaggtacgggaatccttgggaaaagtcgcggccggaatttatgcttcctgtgcacttctatggaaaggtcgagcataccaacaccggaactaagtggatagatacacaagtggtgctggcactgccttacgacaccccagtgcctgggtacatgaataacacagtaaacactatgaggctgtggagtgcccgggcccctaatgactttaatctgagggatttcaatgtcggggattatatccaggcggtactggaccggaaccttgcggaaaatatcagcagagtcctatacccgaacgataatttttttgaggggaaggagttacgcttaaaacaggagtacttcgtcgtggcggccacacttcaggacatcataagaaggttcaaagcatccaaattcggcagtacccgaggtgccggaacagtttttgatgcctttcccgaccaggtggctatacagttgaacgatacacacccggcgcttgcgattcccgaactgatgaggatattcgtcgatatcgagaagcttccatggagtaaagcctgggaacttacacagaagaccttcgcgtatacaaatcacaccgtgctgcccgaagcccttgaacgctggccggtggatctggttgaaaagctattacctcgccacctcgaaatcatctatgagatcaaccagaagcacttggatcggattgtggcactgtttccaaaggacgtggatcgtctgcgccggatgtccctgatcgaggaggaaggctccaagaggatcaatatggcccacctctgcattgtcggaagccatgccgtgaacggcgtggccaagatccactctgatattgtcaaaacaaaagtgtttaaagactttagcgaacttgaacccgataagttccaaaacaaaactaatggtatcactccaaggaggtggctgctgctgtgtaatcccggcctggctgaactaatcgcggagaaaattggagaagactatgtaaaggacttgtcccagctaactaaactgcattcatttcttggagatgacgttttcctgagagaactggcaaaggtgaagcaggaaaacaagctcaaatttagtcagttcctcgagacggagtacaaggtgaaaatcaaccctagcagcatgttcgacgtgcaagtgaaaaggatacacgaatacaagcgtcaactcttgaactgcctgcacgtcattacaatgtataacagaatcaagaaagacccaaaaaagctatttgtcccaagaacagttatcattggtggcaaagcggcgcctggctatcacatggctaagatgatcatcaaactgatcacgagcgtggccgatgtcgtaaataatgaccccatggtgggatctaaactgaaggtcatctttcttgaaaactatcgagtcagcctggccgagaaagtcatacctgccacagacctgagcgagcaaatcagcactgccgggacggaggcttcagggactggaaatatgaagtttatgttgaacggggcactcacaattggaactatggacggcgccaatgtggaaatggcagaggaggcaggcgaagaaaatttattcattttcggcatgcggatcgatgatgtggcggcgctcgacaaaaaaggctacgaggctaaggaatattatgaggcgctccctgagctcaaactcgtgatcgaccagatcgacaacgggttttttagcccaaagcagcccgacctgttcaaggatattattaatatgctgttttatcacgaccgcttcaaggtcttcgctgattatgaggcatatgtcaagtgtcaggataaggtgtctcagctgtatatgaaccctaaggcatggaacacaatggttttgaaaaatatagccgcttctggcaagttcagttcagatcgtaccattaaggaatatgcccagaatatatggaacgtggaaccgtccgatctgaaaatttccttgtcaaatgagagcaataaggttaacggaaac

SEQ ID NO: 250842 - DNA, 2541 bp, synthetic construct
  misc_feature 1..2541: note = Description of Artificial Sequence: Synthetic coding sequence
  source 1..2541: mol_type = other DNA
atggcaaagccactgacggatcaagagaaacgtcgacagatttccattcggggaatagtgggggtggaaaacgtcgcggaacttaagaagtccttcaaccgccatttgcactttactctggtgaaggatcggaacgtcgccactacccgcgactactactttgcgcttgcacatactgtacgcgatcaccttgtgggacgctggattcggacccaacaacattactacgataaatgtccaaagagagtctactacctttctcttgagttttacatgggccgtactttgcaaaataccatgattaatctcggactgcagaatgcatgcgatgaagctatctaccaactggggctcgatatagaagaactggaggaaatcgaagaagatgcgggattgggtaatggcggactgggaaggttggccgcttgctttttggacagcatggctactctgggacttgcagcctacggttacggcattagatacgagtacggaattttcaaccagaaaattcgcgacggttggcaagtggaagaagcagatgattggcttaggtacggaaacccatgggagaagtcaagaccggaattcatgctgccagtgcacttttacggaaaggtcgagcataccaacaccggtaccaagtggattgatactcaagtggtccttgccttgccctacgacacccctgtgcctggttatatgaacaacaccgtgaacactatgaggctgtggagtgcccgtgcacctaatgacttcaatctgagggactttaacgtcggtgattacatacaggctgtgctggaccggaacttggcagaaaacatttcgcgcgtcctgtatcctaatgataacttttttgagggtaaagaacttcgactgaaacaagaatactttgtcgtggcagctaccctccaggatatcataagacgcttcaaggcatcgaaattcgggtcgactcgtggggccggaaccgtgtttgatgcgttccctgatcaggtggcaattcaactgaacgacactcatccggcgctggcgatacccgaactgatgagaatctttgtggatattgagaaactgccatggtcaaaagcatgggagcttactcaaaagacttttgcatacaccaaccacaccgtgcttcctgaagcactggaaagatggcctgtggatctggtggagaagttgcttccacgccatcttgagattatctacgaaatcaaccagaagcaccttgatagaattgtggcattgtttccaaaggacgtggatcggctccgccggatgtctttgattgaggaagagggttcaaagcgaattaacatggctcatctgtgtattgtcggctcccatgcagtgaacggagtcgccaagatccactcggacattgtgaaaaccaaggtattcaaggacttttcagaattggaacccgataagtttcagaataagactaacgggatcacgccaagaagatggctgcttctgtgtaacccaggcctggccgaacttatcgcagaaaagataggcgaggactatgtcaaggatctttctcagcttacgaagctccatagctttctgggtgatgatgtgtttctgagagaacttgcaaaagtgaagcaagagaataagctgaagtttagccaatttctcgaaactgagtataaagtcaagatcaacccttcgtcaatgttcgatgtccaggtcaagaggatccatgaatacaagagacaactcctcaactgccttcatgtcattacgatgtacaatcggatcaagaaagatcccaaaaaactttttgtgcctaggaccgtgatcatcggtggtaaggcagccccgggctaccacatggcaaagatgatcataaaacttatcaccagcgttgctgacgttgtaaacaatgatcccatggttggaagcaagctcaaggtaatcttcctggagaactacagggtgtcccttgcagaaaaggtcattccggcaaccgatctgtcggaacaaatttcaaccgccggcacggaagcatccggaacgggcaatatgaagtttatgctcaatggtgccctgaccataggaactatggatggcgcgaacgtcgaaatggcggaggaagcaggggaggaaaaccttttcattttcggtatgcggattgacgacgttgccgcacttgataagaagggatacgaggcaaaggagtactacgaagcacttcctgaactcaagctcgtgattgatcagattgacaacggattcttctccccaaaacaaccggatctgtttaaggacattatcaacatgctcttttaccatgaccggtttaaagtgtttgccgactacgaggcatacgtgaagtgtcaagacaaagtgtcccagctctacatgaatcctaaggcgtggaataccatggtgttgaagaacattgccgcgagtggtaagttctcatcggaccgcactataaaggaatacgctcagaacatctggaatgtggaaccctccgatctcaaaatctcgctctcaaacgagagcaataaagtgaacgggaat

SEQ ID NO: 250843 - DNA, 2541 bp, synthetic construct
  misc_feature 1..2541: note = Description of Artificial Sequence: Synthetic coding sequence
  source 1..2541: mol_type = other DNA
atggcaaagcccctgacagaccaggagaaacggagacagatttcaataagaggaatagtaggcgtggaaaacgtcgccgaattgaaaaaaagctttaaccggcacctgcatttcaccttagtgaaagataggaacgtcgctaccactagagactattatttcgcactggcccatactgtgagagatcacctagtggggagatggatcagaactcaacagcactattatgacaaatgccccaaacgcgtgtactacctgtccctggagttttatatgggccgcacactccagaatactatgatcaatttggggctccagaatgcctgcgacgaggccatctatcagctgggcctggatattgaagagctggaagagattgaggaggatgccgggctgggtaatggcggcctgggccggctggccgcatgtttcttggatagcatggctaccctgggcctggcagcctatggatatggcatcagatatgaatatggcatttttaaccagaagattagagatggttggcaagtcgaggaggctgacgattggttgcggtatgggaatccttgggagaaatccagacccgaatttatgttacccgtccacttctatggcaaggtcgaacataccaataccggaactaaatggatagacactcaagtggtgctcgcattaccctatgacacacctgtgccaggatacatgaataacaccgttaataccatgaggctttggagtgccagagctccgaatgacttcaacctccgagacttcaacgtgggagattacattcaggcagtgctcgaccggaacttggcagaaaatatctctagggtgctctacccaaatgataatttctttgagggtaaagagcttcggctgaagcaggagtactttgtcgtggccgcgacactccaggacattattagacgttttaaagcaagcaaattcggatcaacgcggggtgccggaacagtgtttgacgcctttcctgaccaagtcgccatccagttgaacgacacacatccagcactggcaatcccagagctcatgcgaatttttgttgatattgaaaaactgccatggagtaaagcttgggagctgacacaaaagacctttgcctatactaaccacaccgtgctgcccgaggcattggaaaggtggccagtggatctcgtggaaaaactgttgccaagacacctggaaatcatttacgaaatcaaccaaaaacatctagatagaattgtggctctgtttcccaaggacgtggaccgactgaggaggatgtccctgatcgaggaggagggttccaagcggattaacatggcacacctgtgcatcgtgggatcccatgccgttaatggagtggccaaaattcatagtgacatagtcaaaacaaaggtctttaaagacttctctgaacttgaacccgataaattccaaaataaaacaaatggcatcacacccagacgctggctactcctttgcaacccgggccttgcagagctgatcgctgaaaaaatcggagaagattatgttaaggacttgagccaattgacaaaactccactccttccttggtgatgatgtgttccttagggagctggccaaagtgaaacaggaaaataaattaaagtttagtcaattcttagagacagaatataaagttaagattaatcccagttccatgttcgacgttcaggtgaaacgcatccatgagtacaagcggcagctgctgaactgtctgcacgtcattaccatgtataatcgcatcaaaaaagatcctaagaaactgttcgtgcctaggacagttattatcggaggcaaggcggcacccggctaccatatggccaagatgataatcaagttaatcacctcggtggctgacgtcgtcaacaacgaccctatggttgggtctaagctgaaggtgatctttctggaaaactatcgagtgagcttagcggaaaaggtgatccccgctacagatctgtccgagcagatcagcacggcaggtacagaagcatcgggaaccggtaacatgaaatttatgctaaacggggcactgactatcggaaccatggacggcgccaatgtcgagatggccgaggaggccggcgaggagaatctgtttatcttcggaatgaggattgatgatgtagctgcactggacaagaagggatacgaagctaaggagtactatgaggccctccccgagctgaagctagtgattgatcagattgataatgggtttttcagcccgaaacagcctgatctttttaaagatataattaacatgcttttttatcatgatcgcttcaaggtctttgcagattacgaagcctacgttaaatgccaggataaagtaagtcaattgtatatgaatcctaaggcctggaacacaatggtccttaagaatatcgccgcctcgggaaagttttcatccgaccggactattaaagaatatgcacaaaatatttggaatgtggagccctctgacctgaaaatctccctcagcaatgaatccaacaaagttaatgggaac

SEQ ID NO: 250844 - DNA, 2541 bp, synthetic construct
  misc_feature 1..2541: note = Description of Artificial Sequence: Synthetic coding sequence
  source 1..2541: mol_type = other DNA
atggccaagccattgacagatcaagagaaacgacgccaaataagtatacgtgggattgtcggagtcgaaaacgttgctgagctgaaaaaatcgttcaatcggcacctccacttcaccttggttaaggacagaaacgtggccactactcgcgattactatttcgctcttgctcacacggtgagggaccacctggtgggccgctggatccgtacccagcagcactattacgataaatgccccaagcgtgtttattacctgagccttgagttctatatgggacgcacgctccagaatacaatgatcaatcttggacttcaaaacgcctgcgacgaggccatataccagctcggcctggatatcgaggagcttgaagagatcgaagaagacgctgggctcgggaatgggggtctgggccgactggccgcctgttttttggactccatggctacattaggcctggccgcatacggctacggcatccgctatgaatatgggatattcaatcagaaaattagggacggatggcaggtggaggaggcagatgattggctgcggtatggtaacccgtgggagaagtccaggcctgagtttatgcttcctgtgcacttctacggcaaagtagaacacaccaataccgggaccaaatggatcgacacacaagtcgtgctggccctcccatacgatactcctgtgccagggtacatgaataacacagtcaacaccatgcgtctctggagtgcacgagcgcccaatgacttcaacttgcgggactttaatgttggtgactacatccaggccgtgctcgaccgcaacctggccgaaaatatcagcagggtactgtatccaaacgacaacttttttgaagggaaggagctgagactcaaacaggagtattttgtggtcgctgcaactttgcaggacatcatccgccggtttaaagcatctaagtttggttctaccaggggcgccggtacggtttttgatgccttccctgatcaagttgccatacagctcaacgacacccacccggcgttggctatccctgagctgatgagaatattcgtcgatattgagaagctcccatggtcaaaggcttgggagctcacccaaaaaactttcgcttacaccaatcacaccgttctccccgaggcgctcgagaggtggcccgtcgatctggtggagaaacttctgcctcgtcatttggagatcatatatgagatcaatcagaagcacctggaccgaatcgttgcgctctttccgaaagatgtggacaggctgcgacggatgtctctgatcgaggaggaaggctccaaaaggataaatatggctcacctgtgtattgtggggagccacgcggtgaacggtgtggcgaagatacactctgatatcgttaagaccaaagtgttcaaagatttctcggaactggagcctgacaaattccagaataagaccaacgggatcactccacggcgctggctcctgctttgcaatcccgggctggcagaactcatcgccgagaagatcggtgaagattatgtgaaggatctttcccagcttaccaagctgcattctttccttggcgatgatgtgttcctacgggagctcgccaaagtaaaacaggagaacaagctgaagttttcgcagttcctggaaacggaatataaggttaagatcaacccctccagcatgtttgacgttcaggtaaagcgcattcacgaatacaagcgccaactcctcaattgtctccacgttatcaccatgtacaaccggatcaagaaggatcccaagaagttgttcgtacctcgtactgtgataatcggaggaaaagccgctccaggctatcacatggcaaagatgatcatcaagttgattaccagcgttgccgatgtggtcaataacgatcctatggttggaagtaagctgaaggtgatattcctggagaattaccgagtgtctctagctgagaaggtgatccccgcaacagacttatcagaacagatctcaaccgcaggcactgaagccagcgggaccggtaatatgaagtttatgctgaacggcgcactcaccattggtactatggatggcgctaacgttgaaatggccgaagaggccggagaagagaatctgttcatattcggaatgagaattgatgacgtggcagcgctggacaagaagggctacgaggcgaaggagtattacgaggctctgccagaactgaagctggtcattgatcaaatagataacggctttttctccccaaagcagccagatctctttaaggacatcatcaacatgttgttttatcatgaccgcttcaaagtcttcgctgactatgaggcgtacgtgaagtgccaggataaagtgtcccaactctacatgaaccccaaggcttggaacacaatggtgctcaagaacatcgcagccagtggaaagtttagctcggaccggaccattaaagaatacgcccagaacatttggaatgtggagcctagcgatctgaagatctctcttagtaatgagtctaacaaggtcaacggtaat

SEQ ID NO: 250845 - DNA, 2541 bp, synthetic construct
  misc_feature 1..2541: note = Description of Artificial Sequence: Synthetic coding sequence
  source 1..2541: mol_type = other DNA
atggctaaacctctgacagaccaggaaaagcgccgccagatatctatacgtggtatcgtgggcgttgagaacgtagctgagctgaaaaagagctttaacagacacctccactttacacttgttaaggacagaaacgttgccactactagggactactattttgccttggctcataccgtccgtgatcacctcgtgggtcgctggattagaacacagcagcattattacgacaagtgcccaaaacgtgtgtactacttgtctctcgaattctatatgggtcgtacacttcaaaacacaatgataaacctgggacttcagaacgcatgtgacgaagctatctaccagctgggactggatatcgaggagcttgaggaaatagaggaggatgcaggactcggaaacggcggccttggccgtctggctgcctgcttcttggatagcatggctacactgggactggctgcttacggttacggcatccgttacgagtacggcattttcaaccaaaagatcagggatggatggcaagtcgaggaggccgatgattggctgcgctatggtaacccctgggagaaatctaggcccgagttcatgctgcctgtccacttttatggaaaggtggagcataccaacacaggcaccaagtggatcgatacccaagtggtgttggctctgccctacgacacacctgttcctggatatatgaataataccgttaatactatgaggttgtggagtgcccgtgcaccaaacgattttaacctgagagactttaatgtgggtgactacattcaggctgtcctcgacagaaatcttgctgagaacatctcaagagtcctgtaccccaatgacaattttttcgaaggcaaggaattgagactgaagcaggagtatttcgtggttgctgctacactccaggacattattcgtcgcttcaaggcctccaagtttggctctacccgcggagctggcaccgtgttcgatgcttttcctgaccaagtcgcaatacagctgaacgacacacatcccgcattggccattcccgaactgatgcgcatcttcgtagatatcgagaagctgccatggtcaaaggcttgggagcttacacagaagaccttcgcatatacaaaccacaccgtgttgcccgaggctctcgagaggtggcctgtggatctcgtcgaaaagctcctccctcgccacctcgaaatcatctacgagatcaatcaaaagcatctggataggattgtcgctttgttccctaaagacgtggatagactgaggagaatgagcctgattgaagaagaaggttccaagcgcatcaacatggctcatctttgtatcgttggatcccacgccgtcaacggagtggccaagatccactctgacatagtgaagacaaaggtatttaaagacttttccgagctggagccagataagttccagaacaaaaccaatggaataacccctagaagatggctgcttctctgtaacccaggcttggctgagcttattgccgaaaaaatcggagaggattacgttaaggacttgagccagcttaccaagttgcactccttcttgggcgatgacgtattccttagagagttggcaaaggtaaagcaggagaacaagctcaaattctcccagttcttggaaaccgaatataaggtgaagattaacccatcctccatgttcgacgtacaagtgaaaagaatccatgagtacaagaggcagttgcttaactgcctccatgtgatcactatgtataatcgcatcaaaaaagaccccaagaaactcttcgtaccccgcactgtcatcatcggaggaaaggctgccccaggctaccatatggctaaaatgatcataaagctcatcacaagcgtcgctgacgtggtaaacaacgatccaatggtgggttccaaactgaaggtaatctttctggagaattaccgcgtgtcactggcagaaaaagttatcccagccacagacctgtctgaacagatttccaccgccggaacagaagctagtggcactggaaacatgaagtttatgctcaacggagccctcactatcggtaccatggacggtgccaatgtcgagatggccgaagaggctggcgaggaaaacctctttatcttcggcatgcgtattgatgacgtggccgcccttgacaagaaaggttacgaagccaaggagtactacgaggccctgcctgagttgaaactggtcattgaccagatcgataacggcttcttctcccccaaacagccagatttgttcaaggatatcatcaacatgttgttctaccacgatagattcaaggtgttcgcagattacgaggcttatgtgaagtgccaggataaggtctcccaactgtacatgaatcccaaagcctggaacacaatggtgctcaagaacattgccgccagtggaaagttcagctcagatcgtaccattaaggaatacgctcagaacatctggaatgtggaaccttctgacctgaagatatccctctctaatgagagtaacaaggtaaacggtaac

SEQ ID NO: 250846 - DNA, 2541 bp, synthetic construct
  misc_feature 1..2541: note = Description of Artificial Sequence: Synthetic coding sequence
  source 1..2541: mol_type = other DNA
atggctaagcccctgaccgaccaagagaaacgccggcaaatcagcatccgcggaatcgttggcgtggaaaatgtggcagagctgaagaagagcttcaaccggcatttgcacttcacgctcgtgaaggaccgcaacgtggccactactcgcgattactattttgcacttgcccacactgtgagggaccacttggtcggtagatggatccgcactcagcagcactactacgacaagtgccctaagcgcgtgtattatctctctctggagttctatatgggacggaccctccagaataccatgattaatctgggcctgcagaatgcctgcgatgaagccatctaccaacttggcctggatattgaagaactggaggagatcgaagaggatgcgggcctcggaaacggtggactgggcagactcgccgcctgtttcctggactcgatggcaaccctgggcctggcagcgtacggttacggaattagatacgagtacggaatcttcaatcaaaagatccgcgacggatggcaagtggaagaagcggacgactggctcaggtacgggaacccgtgggaaaaatcccgcccggaattcatgttgccggtgcacttttacggaaaagtggagcacactaacaccggtactaagtggattgatacccaagtcgtgctcgctctcccgtatgatactccagtgccgggatacatgaacaataccgtcaacaccatgcgcctctggtcggcacgcgccccaaacgatttcaatcttcgagactttaacgtgggtgattacattcaggccgtgttggacagaaacctggccgagaacatcagccgcgtgctctaccctaacgacaacttctttgagggaaaagagctgaggctgaaacaagagtacttcgtggtggcggcgaccctccaggatatcatccggcggttcaaagcgtcgaagttcggctcaactcgcggagctggaactgtgttcgacgcgtttcccgaccaggttgctatccagctgaacgatactcaccccgcgcttgccatcccggaactcatgagaatcttcgtcgacattgaaaagttgccttggtcaaaggcctgggagctgactcagaaaaccttcgcctacactaaccataccgtactgccagaagcattggagcggtggccggtggacctcgtcgaaaagttgctgccgagacacctcgaaatcatctatgaaatcaaccagaagcatctcgacaggatcgtggccctgttcccgaaggacgttgaccggctgcgccggatgagcctgatagaagaagaggggtccaagaggatcaacatggcacacctgtgcatcgtgggctcccacgccgtgaacggtgtggccaagatccattccgacatcgtcaagacgaaggtgtttaaagatttctcagagctcgagccggacaaatttcaaaacaagacgaatggcatcaccccacggaggtggctgctgctttgcaacccgggacttgccgaacttatcgctgaaaagatcggggaggattacgtgaaagacctgtcacaactgactaagctccactccttcctgggagacgacgtgttcctgagagaattggcgaaagtgaaacaggaaaacaagctgaagttctcacaattcctggaaaccgaatacaaggtgaaaatcaacccatcaagcatgtttgatgtgcaagtgaagcggatccacgaatacaaacggcagctcctcaattgcctccacgtgatcactatgtacaatcgcattaagaaggatcccaagaagctgttcgtgccccggactgtgatcatcggaggcaaggctgcccctggctaccatatggctaaaatgatcatcaagctgatcacttccgtggccgatgttgtgaataacgatccaatggtgggatctaagttgaaggtgatcttcctggagaattaccgcgtatcgctggcggagaaagtcatacctgctaccgatctgagcgagcaaatctccaccgcgggaactgaagcgtcgggcaccgggaacatgaagttcatgctgaacggcgctctgactatcggaactatggacggcgccaacgtggagatggctgaggaagcgggtgaagaaaacctctttatcttcggaatgagaattgatgacgtggcggctctggacaagaagggttacgaagcgaaggaatactacgaagccctcccagaactgaagctggtgatcgatcagatcgacaatggcttcttctcaccgaaacagcctgacctgttcaaggacatcatcaacatgctcttttaccacgaccgtttcaaagtgttcgctgactacgaggcgtacgtcaaatgccaggataaggtatcccagctgtacatgaatccgaaggcctggaataccatggtgctcaaaaacatcgccgcgtcgggaaaattctcaagcgaccgcaccatcaaggaatatgcgcagaatatctggaatgtggaaccctccgatctgaagattagtttgtcgaacgagtccaataaagtgaacggcaac

SEQ ID NO: 250847 - DNA, 2541 bp, synthetic construct
  misc_feature 1..2541: note = Description of Artificial Sequence: Synthetic coding sequence
  source 1..2541: mol_type = other DNA
atggccaaaccccttacggatcaggaaaaaagacgccagatttcgataagaggaattgtgggtgtggaaaatgtggcggagcttaagaagagctttaacaggcatctgcactttactcttgtaaaggatcgtaacgtggccaccacgagggattactacttcgctctcgcacacactgtgcgggatcatttggtggggaggtggatccgcacccaacaacactactacgataaatgtcctaagcgcgtctactacctctccctcgagttttacatggggaggaccctccagaataccatgatcaacctgggtctgcagaacgcatgtgacgaagccatctaccagctcggtttggatattgaggaacttgaagaaatcgaagaggacgccggactcggtaatggtggcctgggtaggcttgcagcatgtttcctcgattcgatggcaaccctcggactcgctgcctacggttacggaatacggtacgaatacggaatattcaaccagaagattagagatggttggcaagtggaagaagcggatgactggctgcgttacggaaacccttgggaaaagtccagaccagagtttatgctgcccgtgcacttttatggtaaggtcgagcatactaacactggcactaagtggattgacacccaagtcgttctggcacttccatacgacaccccagtgccgggatacatgaacaatactgtgaacaccatgcgcctgtggagcgcacgagcccctaacgatttcaacctgagagacttcaatgtcggggattacattcaagccgtcctggatagaaaccttgcggagaacatttcacgtgtactttaccctaatgacaacttttttgagggtaaggaactccgcctgaagcaggaatacttcgtggtcgcggcgactcttcaagacataatccgccggttcaaggcctccaagtttggatccacccgcggtgcggggactgtgttcgatgcatttccagatcaagtcgcaatccagctcaatgacacccatccagccctggcgatccccgagcttatgagaattttcgtggacatcgaaaagttgccgtggtcgaaagcatgggaactgactcaaaaaacctttgcttacaccaatcatacggtcctgcctgaggcccttgaacgctggcctgtggacctcgtggagaaacttcttcctcgccatctcgagatcatatacgaaatcaaccaaaaacatctggatcgaatcgtggccctgtttcctaaggatgtcgacaggctgcgtagaatgagtctcatcgaagaagagggttcaaaacggataaacatggctcatctgtgtatagtgggatcacatgcagttaatggagtcgccaagattcattcggacatcgtgaaaactaaagttttcaaggatttctcagaactggaacctgacaagtttcagaacaaaaccaacgggattacccctcgccgatggctgctcctttgtaacccgggcctggcagaacttattgcagaaaagatcggggaagattacgtgaaggatctctcgcagttgactaaacttcactcttttttgggtgatgatgtatttcttcgagaactcgcaaaggtgaagcaagaaaacaaactgaagtttagccaatttctcgagactgaatacaaagtgaaaatcaacccatcgtcgatgtttgacgtgcaagtgaaacgtatacacgagtataagaggcagttgctgaactgcctccacgtgatcaccatgtataacagaattaagaaggaccctaagaagttgttcgtgcctagaactgtcattataggtggtaaagcagcgccaggttaccatatggcgaaaatgatcataaagctcatcacctcggtggcagacgtcgtgaataacgatcccatggtcgggtccaagctgaaggtcattttcctggagaactatcgagtgtcccttgcagaaaaggtgattcctgcgaccgacctgtccgaacagatttccaccgcaggtacggaggcatccggcacgggcaatatgaagtttatgttgaacggggcacttaccatcggaaccatggacggggcaaacgtggagatggccgaggaggcaggagaggagaatctgttcattttcggaatgagaattgatgacgtggcagcactggataagaagggctacgaggcaaaagaatactacgaagcccttccagagcttaagctggtcatcgatcaaattgataatgggttcttttcacccaagcagccagatctctttaaggatatcataaacatgttgttttaccacgaccgcttcaaggtgttcgcagattacgaagcgtacgtgaaatgtcaggataaggttagccaactgtatatgaatcctaaggcatggaatactatggtgcttaagaacatagcggcatcgggaaagttctcgtcagatcggaccattaaagaatacgctcagaacatatggaatgtggaaccaagcgaccttaagatctcactctccaacgagtccaataaagtgaacgggaat

SEQ ID NO: 250848 - DNA, 2541 bp, synthetic construct
  misc_feature 1..2541: note = Description of Artificial Sequence: Synthetic coding sequence
  source 1..2541: mol_type = other DNA
atggctaagccccttactgatcaggaaaagaggcgtcagatttcgatcagaggaatcgtcggtgtggaaaatgttgcggagctgaagaaaagcttcaaccggcacctgcactttaccctagtcaaagatagaaacgtggctacaactagagactattactttgcgttggctcacaccgtcagggaccacctcgtggggagatggatccgcacacaacagcactattacgacaagtgtcccaaacgggtttattaccttagcctagagttttacatgggtaggacccttcagaacactatgatcaatctcggactgcagaatgcctgcgatgaggccatatatcagctcggcctggacatcgaggagctcgaggagatcgaagaggacgcggggcttggcaacggtggactgggccggttggcagcttgttttctggattccatggctactcttggattagccgcctacgggtacggcatccggtatgagtacggcatctttaaccagaaaatccgggacgggtggcaggtagaggaagcagatgattggcttcggtacggaaacccgtgggaaaaaagtaggccggaattcatgttacccgtacacttttacggtaaggtggagcataccaacaccggcaccaagtggatcgacacccaagtagtgctagccctaccatatgacaccccggtgccgggctatatgaacaatacggtgaacaccatgcgactctggagtgcccgcgccccaaatgacttcaacctgcgagattttaatgtcggggactacatacaggctgtcctggaccgtaatctcgcagagaacatcagcagggtcctgtaccctaacgataatttttttgaaggtaaagaactccggctgaagcaagagtactttgtggtagctgcaactctgcaggacatcattcgcagatttaaggcttctaagtttgggagtacccgcggagctggaacagtttttgatgcctttccggatcaagtggccatccaactgaacgacactcaccccgctctcgcaattcctgagctgatgcgcatctttgtcgacatcgaaaagctgccttggagcaaggcttgggaattgactcagaagacctttgcatacactaatcacactgtcctgccagaagcactagagcgctggccggtggatcttgtagagaagttgctaccacggcatttagaaatcatttatgagataaaccagaagcatttggacaggatcgtcgccctttttccaaaagatgtggatcggctacggcggatgagcttgattgaagaggaagggagcaagagaattaacatggcacacctgtgtatcgtgggcagtcacgcagtgaacggcgtagcaaagatccactctgatattgtgaagactaaggtttttaaggacttctctgaactcgaacccgataaattccagaataagacaaacgggatcacacccagacggtggttgctgctctgtaatcctggcctggcagaactgattgctgaaaaaatcggagaagattatgtgaaggacctatcccagcttaccaagctgcattcatttctgggagacgatgtgtttctccgggagctggctaaagtgaaacaggaaaacaagctgaaattctcacagttcctggaaactgagtacaaagttaagattaatccaagtagcatgtttgatgtgcaagttaagcgtatccacgagtacaagagacagctccttaactgcctgcacgtgattacaatgtacaaccggatcaaaaaggatcccaagaaactgtttgtcccaagaacagtgattattgggggcaaggcggctccaggctatcacatggcaaaaatgatcatcaagctgatcaccagcgtagccgatgtggttaacaatgatccaatggtgggaagtaagctaaaggtgatctttttggaaaactaccgggtgagtctggccgagaaagtgatacccgccactgatctttcagagcagatctctactgcgggcaccgaggcttccggcaccggcaacatgaaatttatgctgaatggcgctctgaccattggaaccatggatggggctaacgtcgaaatggctgaagaggccggcgaagagaacctttttatttttgggatgaggatcgacgacgttgcagccctggacaaaaaagggtatgaagcaaaggaatattacgaggccttgccagaattgaaactggtaattgaccaaattgataatggtttctttagccccaaacagcccgatctgttcaaagatattatcaacatgttgttttaccacgaccgtttcaaggtgttcgccgattatgaagcctacgtgaaatgccaggacaaggtatcacagttgtacatgaatcccaaagcttggaacacaatggtacttaagaatatcgcagcaagtgggaaattcagttcggatcgcacaattaaagagtacgctcagaatatttggaacgtcgagccgtctgacctgaagatctccctgagcaatgagtccaacaaggttaacggtaac

SEQ ID NO: 250849 - DNA, 2541 bp, synthetic construct
  misc_feature 1..2541: note = Description of Artificial Sequence: Synthetic coding sequence
  source 1..2541: mol_type = other DNA
atggctaagcctctcaccgatcaagagaagcgtagacagatttccataaggggtattgtaggagttgaaaacgttgcggagttgaagaaaagtttcaataggcatctccatttcacgctcgttaaagatcgtaatgttgctaccacaagggattactattttgccctcgctcatactgttcgagatcatcttgtcggacgatggattaggacacagcagcattactacgataagtgcccaaagagggtttactacttgagtttggaattctatatgggcaggactttgcaaaatacgatgataaatttgggtctgcagaatgcctgcgacgaggcaatctaccaactaggccttgatatagaggaacttgaggagatcgaagaagatgcgggacttgggaacggaggtttgggtaggctcgctgcctgtttcttagatagcatggctacactgggtctggccgcttacggttacggtatcaggtacgaatatgggatttttaaccagaaaatcagagacggttggcaagttgaggaggctgatgattggctgagatacggtaatccttgggagaagtcgcggcctgagttcatgttgccagtacatttctacggtaaggttgagcataccaacactggaactaagtggatcgacacacaggttgtgttagcactaccatatgacactccagttcctgggtatatgaacaatacagtgaacactatgcgcctatggtcggctcgagccccaaatgattttaatctccgtgattttaatgttggggactatattcaagccgtgctggacaggaatttagccgaaaacattagcagggttctctacccaaatgataacttctttgagggaaaagagctaagactgaaacaggaatatttcgtcgtagctgcaactctccaggatatcattagaagatttaaagcttctaaattcgggtctacacgaggcgccggtaccgtgttcgatgccttccctgatcaggtggctatacaactcaacgacacacatccagctttggcaattcctgaacttatgaggatcttcgttgacattgagaagcttccatggagtaaggcatgggaacttacacaaaaaacattcgcttataccaatcataccgtccttcctgaagctttagagcgctggcctgtggatttggttgagaagttgttgccccgtcaccttgagattatctatgaaataaatcaaaagcaccttgatcgcatcgtcgctttatttccaaaagacgttgaccggttgcggcgtatgtctcttattgaggaggagggttcaaagaggattaacatggctcacctttgtattgtgggatcacatgcagtcaatggagtcgcaaagatccacagtgatattgttaagactaaggtgtttaaagatttctctgagcttgaaccggacaagtttcaaaataaaacaaacgggataacaccaaggcgttggctattgctttgtaatcctggacttgccgaattgatagctgaaaagattggtgaggactacgtaaaggatctttctcaacttacaaagcttcattcctttttgggagatgatgtctttctgcgggaattggctaaagtgaagcaggagaacaagcttaagttctcgcaattcttggagaccgaatacaaggtgaaaattaatccaagctccatgttcgatgttcaggtcaagaggattcatgagtacaagaggcaattgttgaattgcttacatgtaatcactatgtataaccgcataaagaaagaccccaagaaattgtttgtgccccgtaccgtaattattggcggaaaggcagcgccggggtaccatatggcaaagatgataattaaacttataacttccgttgcagatgttgttaataacgatccaatggtaggatctaagttgaaagtaattttccttgaaaattaccgcgtgtccttggctgagaaagtgatccccgctacagacttgagtgaacaaatctccactgctggaaccgaagcttcaggcacgggtaatatgaagttcatgttgaacggagctttgacgattggtaccatggatggtgctaacgttgaaatggcagaggaggccggagaggagaatctttttatcttcgggatgagaattgatgacgtagcagctcttgataagaagggatacgaggccaaagaatattatgaagcactccccgagttgaagttggtcatcgatcaaattgataatggcttcttttcgcccaagcaacccgatctttttaaggacataattaacatgctcttctaccacgatcgtttcaaagtattcgccgattatgaagcatacgttaaatgtcaggataaggtttctcagctgtacatgaatcctaaagcctggaataccatggttcttaagaatatagctgcttccggtaaattttcttctgatcgaaccattaaagagtatgcacaaaatatttggaacgtggagccttcggatcttaaaatttctctctctaatgaatcaaacaaagtcaacggcaat

SEQ ID NO: 250850 - DNA, 2541 bp, synthetic construct
  misc_feature 1..2541: note = Description of Artificial Sequence: Synthetic coding sequence
  source 1..2541: mol_type = other DNA
atggccaagccgcttactgatcaggagaaacgtagacagatctccattcggggcatcgtgggcgtggagaacgtggccgagctgaaaaagtccttcaatcgtcacctgcatttcacgctcgtgaaggacaggaatgtcgctactactcgggactactacttcgcgttggcccacaccgtgcgggaccacctggtgggccggtggatcaggactcagcagcactactacgacaagtgtccgaagcgggtctattacctgtcactggagttctacatgggtaggaccctgcagaatactatgattaacttgggcttgcagaacgcgtgtgacgaagcaatctaccaattgggacttgatatcgaagagctcgaggagatcgaggaggacgccggactcggaaatgggggcctggggaggcttgcagcgtgcttcctggattccatggctactctgggcctggccgcctacggctacgggatccgctatgagtacggcatcttcaatcagaaaatacgggatgggtggcaggtggaggaagctgatgactggctgcgctacggcaacccgtgggagaaaagccgtccggagttcatgctgccagtgcatttctacggaaaggtggaacataccaacacgggtaccaagtggatcgacactcaggtcgtgctcgccctgccgtacgatacccctgttccgggttacatgaacaacaccgttaatactatgcgcttgtggagcgctagagccccaaacgatttcaatctccgcgactttaacgtgggggactatatccaggcagtgctggaccggaacctcgcagagaacatctcgcgggtgctgtacccgaacgacaatttcttcgagggaaaggagctgcgcttgaaacaggagtatttcgtggtggccgcaaccctgcaggacatcattagacgcttcaaggcctcaaagttcgggtccacccggggagccggaactgtgttcgatgcgttcccagaccaggtcgctatccaactgaacgatactcaccctgccctggcgatcccggagcttatgagaatcttcgtggatatcgaaaagctgccatggtcaaaggcatgggagctcacccagaaaaccttcgcatacaccaatcataccgtcttgcccgaggctctggaacgctggccggtggacctggtggagaaactgctgccacgccacctcgagatcatctacgaaatcaaccagaaacacctggatagaatcgtggctttgtttcctaaggacgtagatagactgagacggatgtcccttatcgaggaagaaggttcgaaaaggatcaacatggcccatctctgcatcgtgggaagccatgctgtgaatggagtcgcgaagatccattcggacatcgtcaaaactaaggtgtttaaggacttctcggaactggaacctgataagttccagaacaagactaatggaatcaccccgagacgctggctgctgctctgcaatcccggattggccgaactgattgcggaaaagatcggagaggattacgtgaaggacctgtcccaactcaccaagctgcattcgtttcttggtgatgacgtgttcttgcgcgagttggccaaggtgaagcaagagaacaagctcaagttctcacaattcctggagactgagtacaaggtcaagataaacccctcctccatgttcgacgtgcaggtgaagcggatccacgaatacaaaagacagctcctgaactgccttcacgtgattaccatgtacaacagaatcaaaaaggaccctaagaagctgttcgtcccacggacggtgattatcggaggaaaggccgccccaggataccacatggccaagatgataatcaaactgattacgtctgtggcggacgtcgtgaacaacgaccccatggtgggctcaaagctgaaggtgatcttcctggagaactaccgcgtgagcctggccgaaaaagtgatcccggccactgacttgtccgagcaaatttcgacggccggtactgaagcctcaggaactgggaatatgaagttcatgctcaatggcgctcttacgatcggcacgatggacggtgcgaatgtcgaaatggccgaggaggcaggcgaggagaacctgtttatcttcggcatgagaatcgatgacgtcgctgcactggataagaagggctacgaagcgaaggaatactacgaagcactgccggagctgaaactggtgattgatcaaatcgacaatggattcttttcgccaaagcaaccggatctgtttaaggatatcatcaatatgctgttctaccacgatcgctttaaggtctttgccgattacgaagcctacgtaaagtgccaggacaaagtgtcacaactgtatatgaatccaaaggcctggaatacgatggtgctcaaaaacatcgctgcatcgggaaaattctcttccgataggaccatcaaggaatacgcgcaaaacatctggaacgtggaaccttccgatctgaagatctcgctcagcaacgagtcgaataaagttaacgggaac

SEQ ID NO: 250851 - DNA, 2541 bp, synthetic construct
  misc_feature 1..2541: note = Description of Artificial Sequence: Synthetic coding sequence
  source 1..2541: mol_type = other DNA
atggcaaaaccattaacagaccaagagaagagaagacagatcagcattagagggatcgtcggcgtcgagaatgttgccgaactgaagaagagtttcaatcggcatctccatttcaccctggtgaaggaccgaaatgtggccacgacgcgtgactactacttcgccctggcccacaccgttagagatcacctcgtgggaaggtggatccgcacccagcagcattactatgacaagtgtccaaagagagtctattatctatctctcgaattttacatggggaggacactgcagaatactatgatcaacctgggccttcagaacgcatgtgatgaggccatataccagctggggttggacatcgaggaactggaagagatcgaagaggatgcagggcttggaaacggcggactgggaagactggccgcctgcttcctggacagcatggccacactgggcctggcggcttatggttacggaatccggtatgagtatggcatcttcaatcagaagatacgggacggctggcaggtggaggaggccgatgactggctccgatacgggaatccctgggaaaagtcccgcccagagttcatgctcccggtgcatttttacggaaaggtggagcacaccaatacaggtaccaagtggatcgatactcaagttgtcctggccctcccttacgacacaccggtgcccggatatatgaataatacagttaatactatgcgcctgtggagcgcccgcgcccccaacgattttaatctgagggactttaatgttggcgactatattcaagccgtgctggacagaaacctggctgaaaacatctcccgcgtgctgtatccgaacgataactttttcgaggggaaggaactgcggctgaaacaggagtactttgtcgtggccgctaccttacaggatatcatcaggcgattcaaggcctccaaatttgggagcacgagaggcgccggaactgtcttcgatgctttccccgaccaggtggcgatccagctgaatgacacccatccggccctagcaattcccgaacttatgaggatcttcgttgatattgagaagctgccttggtccaaagcctgggagcttacacaaaagacatttgcctatacaaatcacaccgtgctcccagaggctctcgaaagatggccagtcgatctcgtcgagaagctactgccgaggcatttagagatcatttatgaaatcaaccagaagcacctcgatcggattgtggccctgttcccaaaggatgtggatcgcctcaggaggatgtcgctcatcgaggaagaagggagtaagcgcatcaacatggcccacctttgtatcgtgggctcacatgctgtgaatggggtggccaaaatccactctgacatcgtgaaaaccaaagtgttcaaggacttctctgaactggagcccgataagtttcagaacaagaccaatggcatcacacctagaagatggcttctgctgtgcaacccaggcctcgccgaactcatagccgagaaaattggcgaagactatgtcaaggacctgtcccagcttacaaaacttcactcattccttggtgacgacgtttttcttcgcgagttggcaaaggtgaagcaggaaaataagctcaagttctcccagttcctcgagacggagtacaaggtgaaaatcaatccttcctctatgttcgatgtgcaagttaagaggatccatgaatataaacgtcagctattgaactgcctccacgtgatcaccatgtataatcggatcaagaaggacccaaagaaactctttgtacctcgcactgtgatcataggagggaaagctgcgccggggtaccatatggccaagatgatcattaagcttatcacctccgtggcagatgttgttaataacgacccaatggtcggctcaaagctcaaggtgatattcctggaaaattatcgagtgagcctcgcggagaaggtgatccccgccactgacttatcagaacagatcagtaccgccggcactgaggcatcagggactgggaatatgaagttcatgctgaatggagccctgacaattggcaccatggatggagcgaacgttgaaatggccgaagaagcaggtgaggaaaacctctttatctttggtatgcgcattgatgacgtagccgctcttgataaaaagggctacgaggccaaggagtactacgaggcgctgccagaactgaaactggtcatcgatcagatagacaatggcttctttagtccgaagcaaccagacttgttcaaggatataatcaacatgctattttatcatgaccgatttaaagtattcgctgattatgaagcctacgtgaaatgtcaggataaggtgagtcagctctatatgaatcctaaagcctggaacactatggtcctgaagaacatcgcagcgtcgggaaaattctccagcgatcggaccatcaaggagtacgcccagaacatttggaatgtggagccatcagacttgaagataagcctgtccaacgaatctaacaaggtcaatggcaat

SEQ ID NO: 250852 - DNA, 2541 bp, synthetic construct
  misc_feature 1..2541: note = Description of Artificial Sequence: Synthetic coding sequence
  source 1..2541: mol_type = other DNA
atggcaaagccactcacagaccaggagaagcgcagacagatttcaatacgcggcatcgtgggggtggaaaacgtggctgagctgaagaagtcattcaaccgccatctccattttaccttggtgaaggaccggaatgtcgccacgacacgggattactattttgcactcgctcatacagtgcgggatcatctggttgggcgctggatcaggacacagcagcactactacgataaatgtcctaaaagggtctattacctgagcctggaattctatatgggtagaaccctccagaacaccatgattaacttaggattgcagaatgcttgcgatgaagccatctaccagctgggcctggacatcgaagagctggaggagatcgaggaggacgcgggcctcggcaacggcgggttgggaagacttgccgcgtgcttccttgactccatggcaacccttgggttagccgcgtacggatacggcattcggtacgagtacggtatttttaatcagaagatccgcgacggatggcaagtggaagaggccgacgattggctgaggtacggaaatccatgggaaaaatcaaggcctgagttcatgctgcctgtccacttttatggaaaggtcgaacatacaaatacagggaccaagtggatagacacgcaggttgtattggccttgccatatgacactccagtccctgggtacatgaataatacagtcaacactatgcgcctctggtccgccagagcaccaaatgacttcaatttaagggacttcaatgttggcgattacatccaggccgtcctggataggaacctggctgagaatatatcacgggtactgtacccgaacgataactttttcgaaggaaaggaattgcgcctcaagcaggaatacttcgtggtggccgctacactccaggatataataagacggtttaaggcctccaaattcggttcaacgcggggagccggcaccgtgtttgacgcctttcctgatcaggtagcaatccagttgaacgacactcaccctgctttagctatccctgaactgatgcgcatttttgtggatatcgaaaagcttccttggtcaaaagcgtgggagttgacccagaaaacttttgcatacaccaatcacacagtgctgccagaggcgctagagagatggcctgtagatttagtcgagaaactactccctaggcatctagagatcatttatgaaatcaaccaaaaacatctcgacaggattgtggccctgttccctaaagatgtggatcgcctaaggcggatgtcgttaatcgaagaggaggggtcaaagaggattaacatggcacatctgtgtatcgtgggttcccacgccgtgaatggggtggccaagatccactcagatatcgttaaaaccaaagttttcaaagatttttcagagctggagccagataagttccaaaataagacaaatggtataaccccaaggcgctggctcctgctgtgtaatcccgggctggccgagctgattgccgaaaagattggtgaggactacgtgaaggatctatctcagttgacaaagctgcactcgtttctgggggacgatgtattcctgcgggagctcgcaaaagtgaagcaggaaaacaagctcaaatttagccagtttctggaaacggagtacaaagtgaaaatcaatccgtcatcaatgttcgatgtgcaggtgaagaggattcacgaatataaaaggcaactcctgaactgtctgcacgtgatcacaatgtataataggataaagaaagatcccaagaagctgttcgtaccgagaacggttattataggaggaaaagcagcgcccgggtaccatatggctaaaatgattattaagttaattacatctgtggctgatgtggtcaacaacgacccaatggtcggctccaaactcaaggtgattttcctcgaaaattatagagtaagtctggctgagaaagtgattcccgcgactgacctttctgagcaaatctctacagccgggacagaagccagcggcacgggtaacatgaaattcatgcttaacggagcgctgactataggaacaatggacggagctaatgtcgaaatggccgaggaggccggtgaggaaaacctttttatcttcggtatgagaatcgatgacgtcgccgccctggacaaaaaaggctacgaggctaaggaatattatgaagctctccccgaactcaagctcgttatagatcagattgataacggctttttcagccccaagcagcctgatttgttcaaggacatcatcaacatgcttttctatcacgaccggttcaaagtgttcgctgattatgaggcctatgttaagtgccaggacaaggtgagtcagctttacatgaacccaaaggcctggaatactatggtgctcaagaacatcgcagcgtctgggaaattttcctctgacaggacaattaaagagtacgcacaaaatatatggaatgtggaaccctccgacctgaaaatatccttaagcaatgagagtaacaaggtgaatggcaac

SEQ ID NO: 250853 - DNA, 2541 bp, synthetic construct
  misc_feature 1..2541: note = Description of Artificial Sequence: Synthetic coding sequence
  source 1..2541: mol_type = other DNA
atggccaaacctcttaccgatcaagaaaagcgcagacagatctccatccgtgggattgtgggagtggagaatgtggctgaactcaagaaatcgtttaacaggcacctccattttacccttgttaaagatagaaacgtggcaactactcgtgactattacttcgcgctggcccacacggtgagagatcacctggtgggaagatggatacgaacccaacagcattactatgataagtgtccaaagagagtgtactatctgtcgttggaattctacatggggagaaccttgcaaaacaccatgattaacttgggtctgcaaaacgcatgcgacgaagcaatataccagctgggactggacatcgaagaactggaagagatagaagaagatgcagggctgggtaatggagggcttgggcggctcgcagcctgtttcctggattcgatggcgacccttggccttgccgcatatggttacggaattaggtacgaatacgggatctttaaccagaagatcagagatggatggcaagtagaagaggccgacgactggttgcggtacggaaacccttgggaaaaatctcgcccggagttcatgctgccagtgcacttttacggaaaggtggaacacaccaataccggtactaaatggatcgatacccaggtggtcctggctttgccctacgatactcctgtgccggggtacatgaacaatacggtcaataccatgcgcctctggagcgcaagagcaccaaacgatttcaacctgcgggactttaatgtcggagactacattcaggcagtgcttgaccgaaacctggccgaaaacatttccagggtcctttacccaaatgataacttctttgaaggtaaggaactgagactgaagcaagagtactttgtggttgcagcaactcttcaggacattatccgtcgctttaaggcctccaaatttgggtcaacccgcggcgccggaacggtgttcgacgcctttcctgatcaagtggcaatccaacttaacgatacccatcctgcacttgcaatacctgaactgatgcggatttttgtggacatagaaaagctcccatggtcgaaggcatgggaactgacccaaaagacttttgcttacaccaatcatactgtgcttccagaggccctggaacggtggcccgtcgatcttgtggaaaagctcctgcctcggcatctggagattatctacgagattaatcaaaagcaccttgatagaattgtggcactgtttcccaaagatgtggatagactccgccgcatgtcgcttattgaggaagaagggtcaaagcgcatcaacatggcacatctgtgtattgtgggatcccatgccgtcaatggcgtcgcaaagattcattcggatattgtcaagacgaaggtgttcaaggactttagcgaactggaaccagataagtttcaaaacaagaccaacggaattaccccacggagatggctgcttctttgtaatcctggacttgcagaactcattgccgaaaagatcggtgaggattacgtgaaggatctgagccagctgactaaacttcatagctttcttggcgatgatgtattccttagagagctggctaaggtcaagcaagagaataagctgaagttttcgcagttcctcgaaaccgaatacaaggtgaagataaacccctcgtctatgtttgatgtccaagtgaaaagaattcatgagtataaacggcagcttctgaattgtctccatgtgatcaccatgtacaaccgcatcaagaaagaccctaaaaagctgtttgtcccacgaacggtcattattggaggaaaggcagcacctggataccacatggcgaagatgattatcaagctgattacctcagtggcggatgtggtgaacaacgacccgatggttggaagcaaacttaaggtgatttttctggaaaactacagggtgagcctggccgagaaggtcatcccagctactgatctgtcagaacaaattagcaccgcgggcaccgaggcctcaggtaccggtaacatgaagtttatgctgaacggagcactcaccattggtaccatggacggagctaacgtggagatggcagaagaagcaggagaagaaaacctgttcatattcggaatgcgtattgacgatgtggcagcacttgacaaaaagggttacgaagcaaaagagtattacgaggcactgccggagttgaagctggtgatagatcaaatcgataacggctttttctcccctaaacaaccagacttgtttaaggatatcattaacatgctgttttaccatgatcgctttaaggtctttgcagattacgaggcatacgtcaagtgtcaggacaaagtctctcaactttacatgaacccaaaggcatggaacaccatggttctcaagaatattgccgcatccggcaagttttcgtccgataggactatcaaagagtacgctcaaaacatctggaacgtggaaccctccgacctgaagatttcgttgtctaacgaatctaacaaagtgaacggcaat

SEQ ID NO: 250854 - DNA, 2541 bp, synthetic construct
  misc_feature 1..2541: note = Description of Artificial Sequence: Synthetic coding sequence
  source 1..2541: mol_type = other DNA
atggccaagcctctgaccgaccaggaaaaacggcgtcagatcagcatccgcggtattgtgggggtcgagaatgtcgcagaactgaagaagtcgttcaataggcacttgcatttcaccctggtgaaagatcggaacgtggccaccacccgggactactactttgcgctcgcacacaccgtgcgggaccaccttgtgggaagatggatcaggacccaacagcactactacgacaagtgtccgaagcgagtctactacctcagccttgaattctacatgggtcgcaccttgcagaacaccatgatcaatttggggcttcagaatgcctgcgacgaagcgatctaccagctggggctcgacatcgaggaattggaggaaattgaagaggatgctggactgggaaacggaggcctgggccggctcgcggcgtgcttcctggactctatggccacgctgggtttggcggcgtacggctacgggattaggtacgagtacggcatcttcaatcagaaaattcgcgacgggtggcaagtggaagaggctgacgactggctgcgatacggaaatccatgggaaaagtcgcggccagaattcatgttgccggtgcacttctacgggaaggtcgaacacactaataccggcaccaagtggatcgatacccaggtggtcctggccctgccgtacgataccccggtgcctggctacatgaacaataccgtgaacactatgcggctgtggagcgcacgcgcaccaaacgatttcaacctgcgcgatttcaacgttggagactacatccaggcagtcctggaccgcaatctggcagagaatatctcacgggtgctctacccaaatgataacttttttgaggggaaggagctgcggctgaagcaggagtatttcgtagtggcagcgactttgcaagatatcatcagacgctttaaagcatccaagttcggatcgacccggggcgcgggaactgtgttcgacgcctttccggaccaagtggccatccagctcaacgacactcaccccgctctcgccatcccggaactgatgcgcatctttgtggacatcgaaaagctgccgtggtcgaaggcctgggagctcactcaaaagacgtttgcatacactaaccacaccgtgctcccagaagcgctggaaaggtggccggtggatctggtggagaaattgttgccgagacatctggagatcatctacgagattaaccagaaacacctcgacagaatcgtggcgcttttcccgaaggacgtcgaccgtctgcgcagaatgtccctgatagaggaagaaggatccaagcggatcaatatggctcacttgtgcattgtcggatcgcacgccgtgaacggagtcgccaagattcattcagacatcgtgaaaactaaggtgttcaaggacttttcggaactcgaaccggacaagttccagaacaaaactaacggtatcaccccgcggagatggttgctcctgtgcaacccaggactggcagagctgatcgctgagaagatcggagaggattatgtgaaagaccttagccaactgaccaaactgcactcgttccttggggatgacgtgttcctgcgcgaactcgccaaggtgaagcaggaaaacaagctgaagttttcacaatttctggaaaccgaatacaaggtcaagataaatccctcgtctatgttcgacgtccaagtgaagcgaatccatgagtacaaacgccagctcctgaactgcttgcatgtgatcaccatgtacaaccgcatcaagaaggatcctaagaagctcttcgtgccgcggacggtgatcataggaggcaaggccgcacccggataccacatggcgaagatgatcatcaaactgatcacctccgtcgcggacgtcgtgaataacgatccaatggtggggtcgaagctcaaagtgatcttcctggagaactatcgcgtgtccctggcagagaaggtgattcctgccaccgacctgtccgaacaaatctccaccgcgggcactgaggcgtcaggtactgggaacatgaagttcatgcttaacggagcactcactatcggcactatggatggtgcgaacgtcgaaatggcggaggaagccggagaggaaaaccttttcatcttcggaatgcggatcgacgacgtggcagccctcgacaagaaaggctacgaagcgaaggagtactacgaagctctgccggagctgaaacttgtgatcgaccagatcgacaacggcttcttctcaccgaaacagccggaccttttcaaagacatcatcaatatgctgttctaccacgatagattcaaggttttcgcagactacgaagcgtacgtgaagtgtcaggacaaagtgtcccagttgtacatgaacccgaaagcatggaacactatggtgttgaagaatattgcggcaagcggaaaattctcatcagatagaaccatcaaggaatatgcccagaatatctggaacgtggagccttcggacctgaagatcagcctgagcaacgaatcaaacaaggtcaatgggaac

SEQ ID NO: 250855 - DNA, 2541 bp, synthetic construct; identical to SEQ ID NO: 250835
  misc_feature 1..2541: note = Description of Artificial Sequence: Synthetic coding sequence
  source 1..2541: mol_type = other DNA

SEQ ID NO: 250856 - DNA, 2541 bp, synthetic construct
  misc_feature 1..2541: note = Description of Artificial Sequence: Synthetic coding sequence
  source 1..2541: mol_type = other DNA
atggctaagcccctaacggaccaggaaaagcgacggcagatttctatacggggtatcgtgggagtcgaaaacgtggccgaattaaagaagtctttcaacaggcatttgcactttaccctggtgaaggatcggaacgtggcaaccacaagggactactatttcgccctggctcatacggtgagggaccacctggtcgggaggtggatcaggacacagcagcattattatgataagtgtcctaaaagagtttactacttgtctttggagttctacatgggacggaccctgcagaacacaatgataaacctagggctgcagaacgcctgtgacgaagccatttatcagctgggattagatattgaggaactggaggagatcgaagaggatgcaggcctcggtaatggggggctcggtcgactggccgcctgttttctagactcaatggctactctcggattggcagcttacgggtatggcattcggtatgagtacggtatctttaatcaaaagataagagatggatggcaggtggaggaggcagatgactggcttcgatacggcaacccttgggagaagtctagacccgagttcatgttacccgtgcatttttatggtaaggtcgagcacaccaatacaggcaccaagtggatcgacacccaagttgtgttggcgttgccgtatgatactcccgtgccaggctacatgaataatactgtaaacacaatgagactgtggtccgcccgcgctcctaatgacttcaacctgcgcgactttaacgtcggtgactacatccaggccgtcttagataggaacctagcagaaaatatctctagggtactgtacccaaacgacaactttttcgaaggcaaggagcttcggttgaaacaagagtacttcgtggtcgcggccacacttcaagacatcattcggcgatttaaggccagcaagttcggatcaacccggggggccggcactgtctttgatgcatttcccgaccaggttgcaatccagctcaatgacacccatcccgcactggccatcccggaattgatgcgcatctttgtcgacatagagaagctgccttggagcaaggcatgggaactgactcagaagaccttcgcctatactaatcatactgtgttacccgaagctctggagcggtggccggtagatcttgtggaaaagctgctgccacggcatctggagataatatacgaaatcaaccagaagcacttggaccgcatcgttgctttgtttcccaaagatgtcgatcgcttgcgccgaatgagccttatcgaagaggagggatccaagcgcataaatatggcgcacttatgcattgtgggctcccacgcagtgaacggggtggcaaaaattcactctgatattgtaaaaactaaagtgttcaaagacttttctgagttggagccagacaagtttcaaaacaagacgaatggaataacaccaagacgatggcttcttctttgcaatccaggacttgccgaactgattgccgagaagattggagaggactacgtcaaagacctctctcagctgactaaactgcattcttttctgggcgatgatgtttttctaagagagctcgcaaaggttaaacaggaaaacaaactgaagttttcccagtttctggagacagaatataaggtgaagattaacccgtcaagcatgttcgacgttcaagtgaaaagaatccatgagtataaaagacaattactgaattgcctccatgtaattactatgtataatcggattaagaaggaccctaaaaagctatttgtacctcggacagtgattatcggcgggaaagcagcccccggctaccacatggcgaagatgatcattaagctgatcacgagtgtcgcagatgtcgtgaacaatgatccgatggtcgggtctaaattgaaagtcattttcttggagaattatagggtaagtcttgcagaaaaggtcatccccgctaccgacctctctgagcaaatatccacagcagggacagaggcatcaggcactgggaatatgaagtttatgctgaacggggcactgaccattgggacaatggacggcgctaatgtcgagatggccgaagaggctggggaagaaaacttgttcatcttcgggatgagaatagacgatgtggcggctctggacaagaaggggtatgaagcaaaggaatactatgaggcattgcctgaacttaagctggtgatcgatcagatcgacaacggctttttctcgcctaagcaacccgatcttttcaaggacataatcaatatgctgttttaccacgataggttcaaggttttcgccgactacgaagcctacgtcaaatgccaggacaaggtttcgcagctctacatgaaccctaaagcttggaacactatggtattaaagaatatcgccgcaagcggtaaattttcaagcgatcgtacaattaaggagtatgctcagaacatttggaatgtcgaacccagtgatctgaagatctccctgtctaatgaatcgaacaaggtgaatggcaac

SEQ ID NO: 250857 - DNA, 2541 bp, synthetic construct
  misc_feature 1..2541: note = Description of Artificial Sequence: Synthetic coding sequence
  source 1..2541: mol_type = other DNA
atggccaagcctctgaccgaccaagaaaagcggagacagatttccattcgcggcatcgttggcgtggagaacgtggccgaattgaaaaagagttttaaccgccatctgcactttacattggttaaagaccgtaatgtggcgaccacgagagactattatttcgctctggctcatacagtgagggaccatctggtcgggcgttggatccgcacgcagcagcactactatgacaaatgtcccaagcgggtatactacctctctcttgaattttacatgggacgaaccttgcagaacacaatgattaatctcggcctgcagaacgcatgcgacgaggccatttatcagctcggcctcgacatcgaagagctggaggaaatcgaggaggacgcaggtctcgggaatgggggcttgggccgtttggctgcctgcttcctcgattcaatggccaccctgggtctcgctgcctatggctatggtatccggtacgagtacggaatttttaatcagaagattcgcgacggttggcaagtcgaagaagctgacgactggctgagatacggcaatccctgggaaaagtccaggcccgaattcatgctgccggtgcacttttacggcaaggtggagcacacgaacaccggaacaaaatggatcgacactcaggtcgttttggcacttccatatgacacccctgtcccaggctacatgaacaacactgtgaatacaatgagactgtggtctgcgagagctccgaatgattttaatttgcgtgatttcaacgtgggcgactatatccaagcagtgttggacaggaatttagccgagaacataagcagagtgctatatcctaacgataactttttcgagggcaaagagctgcggcttaagcaggagtatttcgtagtcgcagctacgctgcaggatatcatccgacgctttaaagcctccaagttcggctcgactaggggtgccggaaccgtatttgacgcgtttccggaccaggtagccatccagctgaacgatacccatccagccctggctatcccggaactgatgaggatctttgtcgacatcgaaaagctcccttggagtaaagcctgggagcttacccagaagactttcgcttacaccaatcatacagtcctgcctgaggccctggaaagatggcctgtcgacctggtggagaaactactgcccaggcaccttgagatcatctacgagattaatcagaaacacttggatcgaattgtggccctgtttcctaaagacgtggatcgcttgcgaagaatgagcttgatcgaggaggaaggaagcaagcgaatcaacatggcgcatttatgtatcgtgggctcgcatgcagtcaacggcgtggccaagattcactctgatattgtaaaaacaaaagtcttcaaggactttagtgagttagagcccgataagtttcaaaacaagacgaacggtatcacgcctcgccggtggttgctgctgtgtaatcccggtctggctgaactgatagccgagaagatcggggaggattacgtgaaggatttatcccagttgaccaaactacactcatttctgggcgatgacgtctttctgcgagaactggccaaggttaaacaggagaacaagttgaaatttagtcagttcctagaaaccgagtataaagtcaagatcaaccctagttctatgtttgatgtgcaggtgaaacgaatacacgagtacaagcgccagttattaaattgcctgcacgtcatcactatgtacaatcggatcaaaaaggatcccaagaagcttttcgtgccaagaacagtcatcattggtgggaaggccgctcccggttatcatatggccaagatgatcatcaagttgatcacaagtgtcgccgatgtggtcaataacgaccctatggtgggcagtaaactgaaggtcatcttcctggagaattatagagtgagcctcgccgagaaggtcattcctgccaccgacctctctgagcaaattagcaccgctggcaccgaggcgagcgggaccggaaatatgaagttcatgcttaatggcgctcttactataggtactatggatggagccaatgtcgagatggcagaggaggccggcgaggagaacttgtttatctttggcatgcggattgacgacgtggcggcactcgataaaaagggctacgaggccaaggagtattacgaggccctgcctgagctcaagctggtcattgatcagatcgacaatggtttctttagcccaaaacagcccgacctcttcaaggacattatcaatatgcttttctatcacgaccgctttaaagtgtttgcagactacgaagcctatgtaaagtgccaagacaaggttagccaactttacatgaaccccaaagcgtggaatacgatggttttaaagaatattgcagcctctggtaagttctcatctgacagaacaatcaaggagtacgcgcagaacatttggaacgtggagccttcagatctgaagatctctctgtctaacgagagcaataaggtgaacggaaat

SEQ ID NO: 250858 - DNA, 2541 bp, synthetic construct
  misc_feature 1..2541: note = Description of Artificial Sequence: Synthetic coding sequence
  source 1..2541: mol_type = other DNA
atggctaagcctctaacagaccaggagaagcgtcggcagattagtatacggggcatcgtcggagttgaaaacgttgcggagctcaaaaagtctttcaatcggcacctccatttcactctggttaaggaccgaaacgtagcaaccacacgcgattactatttcgctcttgcccataccgtccgtgaccatctcgtgggccggtggattaggacacaacaacattactatgacaagtgtcctaagcgggtttactatctgtctctggagttctacatgggccgaacattgcagaataccatgataaacctgggtttgcaaaatgcctgcgacgaagccatatatcagttgggactggacatcgaagagctcgaggaaatcgaggaagacgcaggcttaggcaacggcgggctgggacgacttgccgcctgcttccttgactcaatggccacactcggcctcgccgcttatggctatggcattcggtacgagtatgggatctttaatcagaaaatacgggacggatggcaggtcgaagaggccgacgactggcttcggtacgggaacccatgggaaaaaagcaggccagaatttatgctcccagtgcacttctatggcaaagtggagcacaccaacacgggaacgaagtggatcgatactcaggtagtccttgccctgccgtatgataccccggtgcctggctacatgaataacacagttaatacaatgaggctgtggtccgcccgcgctcctaatgacttcaacctgagggatttcaacgtcggggactacattcaggctgtgctggatcggaacctggcagaaaacatctccagagtcctatacccgaacgataacttttttgaagggaaggagctacggcttaaacaggagtattttgttgtggcagccacgttgcaggacatcatccgcaggttcaaagccagcaagttcggtagtaccaggggagcaggtacggtattcgatgctttccctgatcaagtggcaattcaactgaatgacacacatccggccctggccatccctgaattaatgcgcatcttcgtagacatcgagaaactgccctggtctaaggcctgggagctcacccagaaaacctttgcctacacgaaccatacagtgctccctgaggcgctggagagatggccagtcgaccttgtggaaaagcttcttcctaggcaccttgagataatctacgaaataaatcagaaacacctcgatcggatcgtagcactcttcccaaaggacgtggaccggctgaggcgtatgagtctcatagaagaagagggatccaagcggattaacatggcccacctgtgcattgttggatcccacgccgtgaacggtgtggccaagattcactccgatatcgtgaaaaccaaggtcttcaaggatttcagtgaactggagcctgacaagtttcaaaacaaaaccaacggtatcacacctcggcgttggctcttgttatgcaacccagggctagccgagcttatcgccgagaaaattggcgaggattacgtgaaagacctctcacagcttactaagcttcacagctttctaggagatgatgtttttttgcgagagctggcgaaagtgaagcaggaaaacaaactcaaattttcgcagttcctggagacagagtataaggtgaaaatcaacccttccagtatgttcgacgtccaggttaagcggatccatgagtataaaagacagctgctcaattgtctccatgtgattaccatgtataacagaatcaaaaaggatccaaagaaactgttcgtaccacggaccgtgatcattggagggaaggcagcacctggctatcatatggccaagatgatcatcaagcttatcaccagcgtcgcagatgtggtgaacaacgatcccatggttggctctaaactcaaggtgatcttcctggaaaattaccgagtcagcctggctgagaaggtgattcctgctaccgacctgagcgagcaaatctcaaccgccggaactgaggcctccgggacgggcaacatgaaattcatgctcaacggcgcacttactatcggtactatggacggcgccaacgtggagatggccgaggaagccggagaagaaaacctgttcatcttcgggatgcggattgacgacgtggccgccctagacaaaaagggctatgaggccaaggagtactacgaggccttgcccgaattgaaactcgtcatcgatcagatagacaatgggttcttttccccaaagcagccggatctctttaaggatatcataaatatgcttttctaccatgaccggtttaaagtctttgccgactatgaagcctatgtgaagtgccaagataaagtctcacagctgtacatgaatcccaaggcttggaatactatggtactcaagaatatcgcggctagtggaaaatttagcagtgatcggacaattaaggagtacgcccagaacatttggaacgttgagccctccgatctgaagatatccctctccaacgaatccaataaggtgaatggaaat

SEQ ID NO: 250859 - DNA, 2541 bp, synthetic construct
  misc_feature 1..2541: note = Description of Artificial Sequence: Synthetic coding sequence
  source 1..2541: mol_type = other DNA
atggcaaaacccttgaccgatcaggaaaagcgccgccagatctccattaggggtatcgtgggagttgagaatgtggccgagctgaagaagtccttcaacagacacctgcatttcaccctcgtgaaggatcgcaatgtcgctactactcgagattactacttcgccttggcacacaccgtgcgggatcacttggtcgggagatggatcaggactcaacaacactactacgacaaatgcccgaaaagagtctattatctgtcgctggagttctacatgggacgcaccttgcagaataccatgataaatcttggcctccaaaacgcctgcgatgaggctatttaccagctgggactggacatcgaggagctggaggagatcgaggaagatgcagggctgggcaatggaggtctggggcgcctggctgcctgcttccttgattcaatggccaccctggggctcgctgcctacgggtacgggatccggtatgaatacggcattttcaaccagaagatccgggatggatggcaagtcgaagaagccgatgactggctccggtacggaaacccatgggaaaaaagccgcccagagtttatgcttcctgtgcatttctacgggaaagtcgaacacaccaacaccggcactaaatggatcgacacccaggtggttctggcgcttccgtacgatacgccagtgccgggatacatgaacaataccgtaaataccatgcgcctgtggtccgcaagagcccccaatgactttaacctccgcgacttcaatgtgggcgattacatccaagcagttctggaccggaacctcgcggaaaacatttcccgggtcctgtaccctaacgataactttttcgaaggtaaggaactcagactgaaacaggaatactttgtggtggcagcaactctgcaggatatcatccgccgcttcaaggcttcgaagttcggaagcactcggggagccggcaccgtgttcgacgctttccctgatcaggtcgcgatccagttgaatgacactcaccctgcgcttgccatcccggaactgatgagaatcttcgtggatatcgagaagctcccgtggtccaaggcctgggagctgacccaaaaaacctttgcctacaccaaccacaccgtgctccctgaagcgctcgaaaggtggccggtggacctcgtcgaaaagctgttgcccaggcacctggagatcatttatgagattaaccagaagcaccttgaccggatcgtcgcgctgttcccgaaggacgtggatagattgagaaggatgtcgttgattgaagaagaaggaagcaagcgcatcaacatggcccatctttgcatcgttgggagccacgccgtcaacggagtggccaaaatccattccgacatagtgaaaactaaagtgttcaaggacttctcggagcttgagccagacaagttccaaaacaagactaacgggatcaccccacggagatggctgctcctctgcaacccgggactggcagagctgatcgccgaaaagattggcgaagattacgtgaaggatttgtcacaactgactaagctccatagcttcctgggagatgacgttttcctccgggagctcgcgaaggtgaagcaagaaaacaagctgaaattctcacaattcctggaaacggaatacaaggtgaaaatcaacccgtcgtcgatgttcgatgtgcaggtgaagcggatccatgagtacaagcggcaattgctgaactgcctgcatgtgattaccatgtacaacagaatcaagaaggaccctaagaaactgttcgtgccgagaactgttatcatcggaggcaaggcagccccgggatatcatatggcgaaaatgatcattaaactgatcacttccgtggccgacgtggtgaacaacgacccaatggtgggttcaaagttgaaagtcatcttccttgagaattacagagtctccctggccgagaaggtgattcccgccacggacctgtcggaacagatcagcaccgccggaactgaagcgagcggaaccggtaacatgaagtttatgctgaatggcgcattgactatcggaacgatggacggcgctaacgttgaaatggcggaagaagctggagaggaaaacctgttcatctttggcatgcgcattgacgatgtggccgccctcgacaagaagggctacgaggccaaagagtactacgaagccctgccggagttgaagctggtgatcgaccagatcgacaatggcttctttagtccaaagcagccagaccttttcaaggacatcatcaacatgcttttctaccacgaccgctttaaggtctttgctgactacgaggcatacgttaagtgtcaagacaaagtgagccagctgtacatgaaccccaaggcatggaataccatggtgctcaagaacatcgcagccagcggtaagttttcctccgatagaaccataaaggaatacgctcagaacatctggaacgtggagccttcggatttgaagataagtttgtccaatgaatccaataaagtgaacggcaat

SEQ ID NO: 250860 - DNA, 2541 bp, synthetic construct
  misc_feature 1..2541: note = Description of Artificial Sequence: Synthetic coding sequence
  source 1..2541: mol_type = other DNA
atggcaaagcctcttaccgatcaagagaagagacgtcaaatatccatccgcggtatcgtgggagtggaaaacgtggcagaactgaagaaatcattcaatcgtcatcttcactttaccctggtgaaagatcggaacgtggccaccaccagggactactactttgcacttgcacatactgtgcgggatcacctggtcggaaggtggattagaacgcaacagcattactacgataaatgtcccaagcgcgtgtactacctgtccctggaattctacatggggagaactcttcagaatactatgattaacctcggcctccaaaacgcatgtgacgaggcaatttaccagctgggtctggatatagaagaactggaagaaattgaagaagatgccgggcttgggaatggtgggctgggaaggctggcagcttgcttcctggatagcatggccaccctcggcctcgcagcatacggctacgggattagatacgaatacggcatctttaaccaaaagattcgcgacggatggcaagtggaagaagcagatgactggttgcggtacggtaatccttgggaaaagagcagaccagagtttatgctgccagtgcatttctacggaaaagtggagcacactaacaccggaaccaagtggattgatacccaggtggtcctggccctgccttacgatactcctgtgcccggttacatgaacaacactgtgaacacgatgcgcctttggtcagcacgtgcaccgaatgactttaatctcagggatttcaacgtgggagattacattcaggcggtgctggatcgcaacctcgcagaaaacatctcacgggtgctgtacccaaacgacaacttctttgaaggaaaagaactgcgactgaagcaagagtattttgttgttgccgcaaccctgcaggacataatcagacgctttaaggcctccaagttcggctccacgcggggagcaggaacggttttcgacgcatttccagatcaagttgcaatccaactgaatgacactcatcctgcattggcaatacctgaacttatgagaatctttgtggatattgagaagctgccttggtcgaaggcttgggagcttactcagaaaacctttgcatacaccaaccatactgtactgcctgaagcactggaaagatggccagtcgatctcgtggaaaagctcctgcctcgccatctggagataatctatgagattaatcaaaagcaccttgacagaatcgtggcactgttcccaaaggatgtggatagacttcgcagaatgtcccttatcgaggaggaaggttcgaagagaataaacatggcgcacctttgtattgtcggttcgcatgccgtgaacggagtggccaagatccacagcgatatcgtcaaaacgaaagtgttcaaagattttagcgagctggaacccgacaagtttcaaaacaagactaacggaataaccccacgccgttggcttttgctgtgcaatcctggccttgccgagcttatagccgagaaaattggtgaagattacgtcaaggacctctcgcaactcactaagctccactcattcctcggtgatgacgtctttctgagagaactggctaaggtgaagcaagaaaacaaactgaagttctcacagttcctggaaaccgaatacaaggtgaagataaatccttcctccatgtttgatgttcaagtgaagcgaattcatgaatacaaacgccaactgcttaactgcctgcacgtcattaccatgtacaatcgcattaagaaggatccaaagaaactgtttgtcccacgtacggtgatcattggcggtaaagcagccccaggctaccacatggcaaagatgattatcaaacttattacttcggtggcagatgtggtgaacaatgatccgatggtggggtcaaagttgaaggtgatatttctggaaaactaccgggtgtcgctggcagaaaaggtgattccagcgactgatctgtcggagcaaatttcgactgcaggtactgaggcaagcggaacgggaaacatgaagtttatgctgaatggtgcactgaccattggaaccatggatggagcaaatgtggagatggccgaagaggcaggagaggagaatctgttcatattcggtatgcgtatcgacgacgtcgcagctttggataagaaaggctacgaagcaaaagaatactacgaagcactgcctgagctgaagctcgtgatcgatcagatcgacaacgggttcttttccccgaagcaaccagacctgttcaaagacattatcaatatgctcttctaccatgacagattcaaagtgtttgctgactacgaagcatacgtgaaatgtcaagataaagtctcgcagctttacatgaaccctaaggcctggaacactatggtgctgaagaatattgctgccagcggaaagttttcctcggacagaaccatcaaggaatacgcacagaacatttggaacgtggaacctagcgaccttaagatctccctttctaatgaatcgaataaagtgaacggcaac

SEQ ID NO: 250861 - DNA, 2541 bp, synthetic construct
  misc_feature 1..2541: note = Description of Artificial Sequence: Synthetic coding sequence
  source 1..2541: mol_type = other DNA
atggctaaaccactcactgaccaggaaaaaagacgccagatctctatcagaggaattgtcggcgtggagaacgtggccgaactcaaaaaatcgttcaacaggcatctccacttcacgctggtaaaggatagaaacgtggccaccactcgggattactactttgcgctcgcacacacagtgagagaccacttagttggccggtggataaggactcagcagcactactacgacaaatgtcctaaaagagtgtactacctgtcactggagttctacatgggccgaactctgcaaaataccatgattaacctgggacttcaaaatgcatgcgacgaggcgatctatcaactcggtctcgacattgaggagcttgaggaaattgaggaggatgcgggcctgggtaacggtggtcttggccgcttagcagcatgctttctggatagcatggcaacactcggattggcagcgtacggatacgggatcaggtacgagtacggcatattcaaccagaaaatccgggatggctggcaggttgaggaggccgacgactggctccgttatggtaatccatgggagaagagccggcccgagtttatgcttccagtgcatttctatggaaaagttgaacatacaaacactggcaccaagtggatagatacgcaggtggtcctcgccctcccgtacgacaccccggtccccggctacatgaacaatactgtaaacaccatgcggctctggtccgcccgagctcctaatgattttaatctgagggacttcaatgttggggactacatccaggctgtgcttgaccgaaatttggctgagaatatctctcgtgttctatatccaaatgacaactttttcgagggaaaggagctgcgcttgaagcaggagtacttcgtcgtggcagccaccctgcaggatatcatccgcaggttcaaggctagcaaattcggctccacaaggggggccggcaccgtgtttgatgcctttcctgatcaagtggccatccaactgaatgacacgcaccctgccctggccattcccgagttgatgcggattttcgtggacattgagaaactaccttggtccaaggcctgggagctgacccagaagacattcgcatatacgaaccacacagtgttgccagaagccctggaaaggtggccagtagatctagtggagaagctcctcccccgccacctggagatcatatatgagatcaaccagaagcatctagacaggatagtggccttgttccccaaagatgttgacaggctgcggaggatgtctctcatcgaggaagaaggctccaagcgaattaatatggctcacctgtgcatcgtcggatcacacgctgtaaacggcgtagctaagattcatagtgatatcgttaagaccaaggtttttaaagacttcagtgagctagagccagacaaattccagaacaaaacaaatggtataacgcccaggagatggctgttgctctgcaaccctggtctggcagaactcattgccgagaagataggtgaggattacgttaaggacctatcgcagctcacgaagctgcacagctttctgggtgacgacgtctttcttcgggaattggccaaagtcaaacaggaaaataaactcaagttctcacagtttctggagactgaatataaggtcaaaatcaatccctcctccatgttcgacgtgcaggtgaagcggattcatgaatataagcgacagttgctgaactgcctccatgtgatcaccatgtataacaggattaaaaaagacccaaaaaagctcttcgtgccgcggacggtgatcataggtggtaaggccgcaccagggtaccatatggcaaagatgataattaagctcatcacctctgtggcggacgtggtgaataacgatcccatggtgggctccaagctgaaggtgattttcctggagaattaccgtgtctctcttgcggagaaagtcatccccgccacagatctcagcgaacagatctctacagcaggaactgaggcgtcaggcacggggaatatgaagtttatgctgaatggcgcactgaccattgggacgatggacggtgccaatgtggaaatggccgaggaggctggtgaagaaaacctgtttatcttcggcatgcgcattgacgacgttgcagcgcttgacaagaaaggttatgaggctaaggagtactacgaggccctgcccgaactcaagctggtgatcgatcaaattgacaatggattcttctcccccaaacaaccggatttgttcaaggacattatcaacatgctcttctatcatgatcggtttaaggtgttcgccgattacgaggcctatgtcaagtgtcaggataaggtgagccagctctatatgaacccgaaggcctggaacacaatggtgcttaaaaatattgctgccagcgggaagttctcttctgatcgaactataaaggagtacgcacagaatatatggaatgtcgagccctctgacctcaagatcagcctatccaacgagtctaataaagtaaatgggaat

SEQ ID NO: 250862 - DNA, 2541 bp, synthetic construct
  misc_feature 1..2541: note = Description of Artificial Sequence: Synthetic coding sequence
  source 1..2541: mol_type = other DNA
atggctaagccactgacagatcaggaaaaaaggcgccagattagcatcagaggaattgttggggtagagaatgttgcggagctgaaaaagagctttaataggcatctgcacttcaccctcgtaaaggataggaatgttgcaactactcgcgattattacttcgccctcgctcatacggtgagagatcatctggttggaaggtggatcagaacccagcagcattattatgataagtgcccaaagcgagtgtattacctgtccctcgagttctacatggggagaactctgcaaaacaccatgattaaccttggcctccagaatgcctgtgacgaagctatctatcaactggggctcgacatcgaggagctcgaagaaatcgaggaagatgcaggcctggggaacggcgggctcggccgcctggccgcctgctttctggactcaatggccactctggggctcgcagcctatgggtatgggattcggtatgaatacggcatattcaaccagaaaatccgggacggctggcaagttgaagaagcggacgattggctcaggtatgggaatccatgggaaaagtcacgccccgaatttatgctgcccgtgcacttttatggcaaggttgagcacaccaatacggggaccaaatggattgatactcaagtggtgctcgccttaccttatgataccccggtgcctggctatatgaacaacaccgtaaatacaatgaggctttggtcggcaagggctcccaatgacttcaatcttcgggatttcaacgtgggggattacatccaggccgtgctggaccggaatctggctgaaaacatcagtagggtgttgtatcctaacgataactttttcgagggcaaggagttgcgactgaagcaggaatactttgttgtcgctgccacattgcaggacataatccgccgatttaaggccagcaaatttggcagcacccgcggggcgggaacagtcttcgatgccttcccagatcaggtcgccattcagctgaacgatacccacccagcccttgcgattcctgagcttatgcggatatttgtcgacatcgagaagctcccttggtccaaagcttgggagttaacgcaaaagacgttcgcttacaccaatcataccgtcctgcctgaggccttggagaggtggcctgtagacctcgtggagaagcttttacctagacacttagagatcatatacgagattaaccagaaacacctggaccgaatcgtcgccctgttcccaaaagacgtggacaggctgcgtcggatgtccctcatagaggaggagggcagtaagagaattaatatggctcatctttgcatagttggcagtcacgctgttaatggagttgccaagatccattctgatattgttaagaccaaggttttcaaggattttagcgagcttgaacctgataagttccagaacaagacaaatggcattacgcccagacgatggttgctcctttgtaaccccggcctggctgaactgatagcggaaaaaataggggaagactatgtcaaggacttaagtcagcttactaagctgcattcattcctcggtgatgacgttttcctgcgtgaattggccaaggtgaaacaggaaaacaagctgaagtttagtcagtttttggaaacggagtacaaggtgaagattaacccttcaagcatgttcgatgtgcaggtcaagagaatccacgagtacaagagacaattgcttaattgcctgcatgtaatcaccatgtacaatcgtatcaaaaaggacccaaagaaactgttcgtgcctcgcacagtgatcatcgggggcaaggctgcaccaggctaccacatggcgaagatgatcatcaagctcattacatctgtggcagatgtggtcaataacgatcccatggtgggctctaagttaaaagtgatctttctagagaattaccgcgtttcactggccgagaaagttatccccgccaccgacctgtccgaacagatttcgacagccggcaccgaggctagtggcacaggaaatatgaaattcatgctaaacggtgcacttactattggcactatggatggcgccaacgtggagatggcggaggaggccggcgaagaaaatctctttatctttggaatgagaatcgacgacgtggccgcactggacaagaaggggtacgaggccaaagagtactacgaggccctgccagaactgaagctggtaattgaccagatagacaatggcttcttttcaccaaagcagcccgacctttttaaagatatcatcaatatgttgttctatcacgatcgcttcaaggtattcgctgactatgaagcatacgtgaagtgccaggataaggtctcacagctgtacatgaacccaaaggcctggaacaccatggtactgaaaaacattgcagccagcgggaaatttagtagcgaccgtacgatcaaagagtatgcccaaaatatttggaatgttgaacctagtgatctgaagatttcactctctaacgagagcaataaagtgaacggcaac

SEQ ID NO: 250863 - DNA, 2541 bp, synthetic construct
  misc_feature 1..2541: note = Description of Artificial Sequence: Synthetic coding sequence
  source 1..2541: mol_type = other DNA
atggccaagccgctcaccgatcaggagaagaggcggcagattagtatcagaggaatcgtgggtgttgagaacgtagccgaactgaagaagtcctttaacaggcatcttcacttcaccttggtgaaggataggaatgttgctactacacgggactactacttcgcactggctcataccgtgcgggaccatctggttggaaggtggatcaggacgcagcagcactattacgataagtgccctaagagggtgtattatctaagcctagaattttatatgggcagaaccctccaaaatacaatgattaacctcggcttgcaaaatgcttgcgacgaggcaatctatcaactagggctggacatagaggagctggaggagattgaggaggacgccggcctgggcaatggcggcttagggcgcctggccgcttgttttctcgactccatggccacactcggcctcgcagcctacggttacggcatccgctatgagtacggcattttcaatcaaaagattagggacggctggcaagtcgaggaggccgatgattggctgcgctacggaaacccttgggagaagagccgcccagaattcatgctgcctgtccacttctatgggaaggtggagcataccaacaccggtactaaatggatagatacccaggtggtccttgctcttccctacgacacccccgtgcctggctatatgaataatacagtgaacactatgaggctgtggtctgctcgtgcaccaaacgacttcaatctcagggacttcaatgtgggggattacattcaagccgtgcttgacagaaatctagctgagaatatcagcagggtgctttatccaaacgataatttcttcgaaggtaaggaactgcgcctaaaacaggagtatttcgtcgtcgcagctacgcttcaagatatcatccgcagattcaaagctagcaaatttggatctacaagaggggcgggtacagtattcgatgctttccctgatcaggtcgctatacagctgaatgacacccaccctgcccttgctatccctgagctcatgcgaattttcgtggacatcgaaaagctcccctggagcaaggcctgggagttgactcagaagacctttgcctataccaatcatacagtcctgccagaagccctggaaagatggccagtggaccttgtagaaaagctcttgcccagacacctggagataatctacgagatcaatcaaaagcaccttgatcgcattgtggccctgtttcccaaagatgtggaccggctccgccgtatgagccttatagaggaagaaggaagtaaaagaattaatatggcacacctttgtattgttgggtcccacgcggtgaacggggttgctaaaatacattccgatatcgtgaagaccaaagtgttcaaagacttctcagaactggaaccagacaaattccaaaacaagaccaatggaattacccctaggaggtggctgctgctctgtaaccctgggctggctgagttgatcgcagagaaaatcggggaagactacgtgaaggatctatctcagctgaccaagctacatagcttcctgggtgatgacgtttttctgcgagagcttgcaaaggtgaaacaggagaacaagctgaaattcagtcagttcctggagacagagtacaaggtcaagattaacccctcgagcatgttcgatgtccaggtgaaaagaatccacgaatacaaacggcagcttctaaattgcctccacgtgatcaccatgtataataggattaagaaggacccgaagaagttgttcgtgccccggactgtcattataggaggcaaagctgcccctggataccacatggctaaaatgatcatcaagctgataacgagcgtggctgatgttgtgaataacgacccgatggtggggtcaaaactcaaggtcatttttttggagaactatcgtgtcagcctcgcagagaaggtgatcccagccacagatttgtccgaacagatttctaccgccgggactgaagcctccggaacaggcaacatgaagtttatgctgaacggcgcactcacaattggcaccatggatggggcaaacgttgaaatggccgaggaagcaggtgaagagaacctctttatattcggcatgagaatcgacgacgttgccgctcttgataagaaaggctatgaggccaaggagtactacgaagccctcccagagttgaagcttgttatcgaccagatagacaacgggtttttttcaccaaagcaaccagacctcttcaaggatatcattaacatgctgttttaccatgatagatttaaagtgtttgccgattacgaggcatacgtgaaatgtcaggataaagtctcacagctgtacatgaatccaaaagcatggaacaccatggttcttaagaatattgcagcctccggaaagttcagttccgataggaccatcaaagagtatgcacagaatatttggaatgtggagccatccgacctgaaaatctctctgtcaaacgagtcgaataaagttaatggtaat

SEQ ID NO: 250864 - DNA, 2541 bp, synthetic construct
  misc_feature 1..2541: note = Description of Artificial Sequence: Synthetic coding sequence
  source 1..2541: mol_type = other DNA
atggcaaaacctttgacagatcaagaaaaacgtaggcagatttctatacgtggtatcgtcggtgtcgagaatgtggccgagctgaagaaaagctttaacaggcaccttcactttaccctggtcaaagacaggaacgttgctacaaccagggattattactttgcccttgcacatactgttagagaccacctggtgggaagatggatccgcacccagcaacactattacgacaagtgccctaagagggtgtactatctttcacttgaattttacatgggacgcactcttcaaaacactatgataaacctgggcttgcaaaatgcctgtgatgaagccatttatcagcttgggctggacatcgaagagctcgaagaaatcgaagaggatgcgggtctcggaaatggtggtttggggcgccttgcagcttgctttttggattccatggctacgcttggactggcagcttatggttacggaataaggtacgagtatggcatattcaaccagaagattagggacggctggcaggtggaggaggctgatgattggttgagatacggtaacccttgggagaaaagcagacccgaatttatgcttcctgtgcacttctacggcaaggtggagcacactaacactggaaccaagtggatcgatacacaagtagtcctggcactcccatacgacacccccgtgcctggctatatgaataatacggtcaatacaatgagactgtggtcggcacgcgctccaaatgactttaacttgagagattttaacgtcggagactatattcaagctgtgcttgataggaaccttgctgagaatatcagcagagtattataccccaacgataacttttttgagggcaaggagttgagacttaagcaggagtatttcgttgtggctgctactctgcaagatatcattaggaggtttaaagcctcaaagtttggaagcacaagaggggcgggaacagttttcgatgcattcccagatcaggtggctatccagcttaacgatacccatccagctttggctatccctgagcttatgcgaattttcgttgatatcgaaaaacttccatggagcaaagcatgggagttgacacaaaaaactttcgcgtacacaaatcacacagtacttcccgaagccctggaaagatggcccgtggacttggtcgagaaactcttaccccgacatctcgagattatctacgaaatcaaccagaagcatcttgacagaatcgttgcccttttccccaaagacgtcgatcgattgcgcagaatgagcctcattgaggaagagggcagtaaaagaatcaacatggcccacctttgcattgtcgggtcgcatgctgttaatggcgtggctaagatacactccgacatcgtcaagaccaaagtgtttaaagacttttcggagttggagccggacaaatttcaaaataaaacaaacggtattactcctcgtcgctggctcctgctctgcaaccctggactcgcagaactgatcgctgaaaaaataggtgaggactacgtgaaggacctgtcccaactcacaaagcttcatagctttctgggagacgatgtcttcctacgcgaactcgctaaggtcaaacaggagaacaagcttaagttcagccagtttttggagaccgaatacaaagtgaagattaatccaagctcgatgtttgatgtacaggtcaaaaggatccatgaatacaagagacagctcctaaactgcctgcacgttattaccatgtacaaccgcatcaaaaaggatcccaagaagctgtttgttccaaggacagtcattattgggggcaaagcagcacccggctaccacatggccaaaatgattataaaactcattacctccgtggccgatgtcgttaacaacgaccctatggtcggtagcaagctgaaagttatctttctggagaactatagggtcagccttgctgagaaagtgattcctgctacagatttgtcagagcaaatctccactgccgggaccgaggctagcggcacgggaaacatgaagtttatgcttaatggagcactgaccataggaacaatggatggagctaacgtggagatggctgaagaggccggggaggagaacttgttcatctttggaatgaggatcgatgacgttgccgcactggataaaaaaggttacgaagcgaaagagtactatgaggcactgcctgagctgaaactggtaattgaccaaattgacaacgggtttttttctccaaaacagccggatctctttaaagatattatcaacatgctcttctatcacgataggtttaaggtttttgctgactatgaagcgtatgtcaaatgccaagacaaagtgtctcaattgtatatgaatcccaaagcctggaacactatggtgctgaaaaacattgcagcaagcggcaaatttagttccgacagaaccatcaaggagtacgcccaaaatatttggaacgtcgaaccatcagacctcaagattagtttgagcaacgaaagcaataaggtcaacggcaat

SEQ ID NO: 250865 - DNA, 2541 bp, synthetic construct
  misc_feature 1..2541: note = Description of Artificial Sequence: Synthetic coding sequence
  source 1..2541: mol_type = other DNA
atggccaaacccctcaccgaccaagagaagcggcgccagattagcataaggggcatcgtcggcgtggaaaacgtcgcagagttaaagaaaagcttcaaccggcaccttcactttacactggtcaaggacaggaacgtggcgaccactcgtgattactactttgccctggctcatacagtccgggatcatctggtaggtaggtggatcaggacacagcagcattactatgataaatgtccgaaaagggtttactacttatcactggaattttatatggggcggacactccagaatactatgatcaacctgggtctccagaatgcatgtgatgaggccatataccagctgggcctggacattgaggagctggaagagatagaagaagacgccgggctgggcaatggcgggctgggtcgactggccgcgtgtttcctcgatagtatggccacactgggactcgcagcctacggatacggcattcgctacgaatatggcatattcaaccagaaaatccgggacggctggcaggttgaggaggccgatgattggctacgatatggtaatccatgggagaagtcccggccggagttcatgcttcccgtgcacttctatgggaaggtggaacacacaaatacaggcactaagtggatcgatacgcaggtcgtgctggcgttaccctacgatacccccgtgcccggctatatgaataatactgtcaataccatgcggctttggagcgccagagcccccaacgattttaatctacgtgatttcaatgtgggagactacattcaggccgtgctggaccggaatctggccgaaaacatttcccgggtcctgtaccccaacgacaacttttttgagggaaaagaactccgactgaaacaggagtacttcgtggtggctgccaccctgcaagatataattaggagatttaaagcctctaaattcggttcaacacgaggcgcagggaccgtgttcgacgccttcccagaccaggtcgctatacagctcaacgatacccatcctgctctggccatcccagagcttatgagaatctttgtggatatcgagaaactgccatggtcaaaggcctgggaactgacacagaagaccttcgcctatactaatcacactgtgctccctgaagccctagaacgatggccggttgaccttgttgaaaagttgctccccagacacctcgagatcatctatgagataaatcagaagcacctcgatcgaattgtggctctgtttcccaaagatgtggaccgtctcagacgcatgtccctgatagaggaggagggctctaagaggattaatatggcacatctttgcatcgtgggtagtcacgccgtgaatggagtggccaaaatccactctgatatcgtgaaaaccaaagtcttcaaggacttttctgaactggaacctgataagttccaaaacaagacaaacggtatcacccctaggcggtggttgcttttatgcaatcccgggctcgctgagctgatagccgaaaagattggcgaggactatgtaaaggatctgtcccagctgaccaaactgcatagcttcctaggagacgacgttttcctccgcgagctggccaaagtgaaacaggaaaataagctgaagttttcccagttcctggagaccgagtataaagttaagataaatccttcgtctatgttcgacgtccaagtgaaaaggattcatgagtacaagcgccaactgctgaattgcctgcacgttatcaccatgtacaatcggatcaaaaaggacccaaagaaactgtttgtgcctcggaccgttatcattggcggcaaagcagccccaggttatcacatggccaagatgataattaagctgatcacaagcgtagcagatgtagtcaacaatgaccctatggtcggttctaagttgaaagtgatcttccttgaaaattatagagtctccctcgccgaaaaagttatcccagctactgatttatctgaacagatctcaaccgcaggcacagaggcctccggtaccggtaacatgaagttcatgctgaatggtgccttgacaatcggtacaatggacggagccaatgtcgagatggcagaagaagctggtgaagagaatttgttcatcttcgggatgcgaattgacgatgtagccgcattggataagaaaggatacgaagccaaagaatattatgaggcgctcccagagctgaagctggtgatagatcagatagataatggatttttctcacccaagcagccagacctgtttaaggatattattaacatgctgttctaccatgaccggttcaaagttttcgcggactacgaggcttatgttaaatgccaagacaaggtgagtcagctgtacatgaatcctaaagcgtggaataccatggtgctgaagaacatcgccgcttctggcaagttcagctctgatagaaccataaaggaatacgcccagaatatttggaatgtcgaaccttcggacctaaaaatctcgttgagcaatgaatccaataaggtgaacggaaat

SEQ ID NO: 250866 - DNA, 2541 bp, synthetic construct
  misc_feature 1..2541: note = Description of Artificial Sequence: Synthetic coding sequence
  source 1..2541: mol_type = other DNA
atggctaagcccctgactgatcaggagaagagaaggcaaatttcaattagaggaatcgtgggcgtggagaacgtggctgagctcaagaaatccttcaataggcaccttcacttcactctggttaaggatcgcaatgtggcgactactagagactactatttcgccctcgcccacaccgtccgcgatcatttggtgggaagatggatccggacacagcagcactattacgataagtgccccaagagggtctactacctgagtctcgagttctatatgggccgaacgctccagaacaccatgattaacctcggtctgcaaaatgcctgcgatgaagcaatctatcaacttggattggacattgaagagctggaggagatcgaggaagacgctggccttggcaacgggggcctcggccggctcgccgcttgctttcttgacagtatggcaacactcgggctggcagcctatggttacggaatccgatacgagtacggaatctttaatcagaagattagagacggatggcaggtagaagaggctgacgactggctgaggtacggcaacccgtgggaaaaaagtcggcccgagttcatgctgcccgttcatttttacggaaaggttgagcacaccaacacaggcaccaagtggattgacacacaggtggttctggctctgccttatgatactcccgtgcccgggtatatgaacaacacagtcaatactatgcgactgtggagtgcacgcgctcccaacgactttaatctgagggattttaatgtcggcgactacatccaagcagtgttggacaggaacctcgctgaaaacattagcagggtgctgtatccaaacgataatttttttgagggcaaggagctgcggttgaagcaggagtacttcgtggtggccgcgacactgcaggacataatcaggcgcttcaaagcttccaaattcggcagcactaggggcgctggaaccgtgttcgatgccttccccgaccaggtggccattcagctcaacgacacccacccggcccttgctataccagagctgatgagaatattcgtggacattgaaaagctgccgtggagcaaggcttgggaactgacacagaaaactttcgcttacaccaatcatacagtccttccagaagcactggaacgctggccagtagatcttgtggaaaagctgctccccagacatcttgaaataatttatgagatcaaccaaaagcatttggacaggatagtcgctctgtttccgaaggacgtggaccgcctccgcagaatgtcactgattgaggaagagggctctaagagaatcaatatggctcatttgtgtattgtagggtcccatgcagtgaatggcgtggctaagatccattccgatatcgtcaaaacaaaggttttcaaggatttctccgagcttgagcctgacaagtttcagaataagaccaacggaataactccccggagatggcttcttctttgcaatcctgggctcgcggaactgattgcagaaaaaattggcgaggactacgtcaaagacctgtctcagttgaccaagctgcatagctttctgggcgatgacgttttccttagagagctcgcaaaagtgaagcaagaaaacaaactgaaatttagtcaattcctcgagactgagtataaagtgaagatcaacccttctagcatgttcgacgtgcaggtgaagcggattcacgaatacaagcggcagcttctgaattgcctccacgtgatcactatgtacaatcgaataaaaaaagaccccaaaaagctgtttgtcccacggactgttattattggaggaaaggcagctccgggctaccatatggccaagatgattattaagttgatcacttcagtggccgatgtagttaacaacgacccgatggttggaagcaagctgaaagtgattttcctcgagaattatagggtttctttggctgagaaggtgataccggccactgacctcagcgagcagatctctaccgctggaacagaggcttctggcacgggtaacatgaaatttatgctgaatggagcgctcaccatcggtaccatggacggcgcaaacgtggagatggcagaggaggctggggaagaaaacctgtttatctttggaatgcgcattgacgatgtggcagcactggacaagaagggttacgaagcaaaggagtactatgaggccctgcctgaactgaaacttgttatcgaccagatcgacaacggtttcttctcccctaagcaacccgacttgtttaaggatatcatcaacatgctgttttatcatgatcgattcaaggtcttcgctgactatgaggcttacgtgaaatgccaggacaaggtgagtcagttgtatatgaatcctaaagcttggaacaccatggtcctcaaaaacatcgccgcatctggcaagttttcctctgatcgaacgattaaggagtacgcacagaacatctggaacgtggagccctcagaccttaaaatcagcctctccaacgagagtaacaaggttaatggcaat

SEQ ID NO: 250867 - DNA, 2541 bp, synthetic construct
  misc_feature 1..2541: note = Description of Artificial Sequence: Synthetic coding sequence
  source 1..2541: mol_type = other DNA
atggccaagccgctgacggatcaggagaagcgccgacagatctctattcgaggcatcgtaggtgtggagaacgtcgccgagctcaagaagtcgttcaaccgccatctccactttacgctcgtcaaggaccgaaacgtggcgactacgcgcgattactacttcgccttggcacatactgtgagggaccacttggtcggtcgctggatccggacccagcagcactattacgacaagtgtccgaagagggtatactacctgtcgctggaattctacatgggccgtaccctgcagaacaccatgatcaacctcggtctccagaacgcctgtgacgaagcaatctaccaattgggactcgatatcgaagaacttgaggagatcgaggaggacgctggactggggaatggtggtctgggccgtctcgctgcctgttttttggacagcatggcaacgctaggcctcgctgcctacggctacggcatccgctatgagtacggtatttttaaccagaagatccgtgacgggtggcaggttgaagaggccgatgattggttgcgctatggaaacccttgggagaagtcgcgccctgagtttatgttgccggtccacttctatggcaaggtggaacataccaatactggtaccaaatggattgatactcaagtcgtgctggccctcccgtatgatacccccgtgcctggttatatgaataacacggtcaataccatgcggctctggtccgcccgggcgcccaacgattttaacctgcgcgatttcaatgtcggtgactacatccaggcggtgctggaccgtaaccttgccgagaacatctcccgggtcttatatcccaacgacaatttcttcgagggcaaggaattgcgtctaaagcaagagtacttcgtagtggcagccactctccaggacattatccggaggttcaaggcctccaagtttggctcaactcgcggtgctggtaccgttttcgacgcgttccctgaccaggtcgccatccagctgaatgatacacaccccgccctggctatccctgagcttatgcgcatcttcgtcgacatcgaaaagctgccgtggagcaaggcgtgggaactcacccagaagaccttcgcctacactaaccatacggtgctgcccgaggcgttggagcgctggcccgtcgacctggtcgagaaacttctcccacgtcatctcgagattatctacgaaatcaatcaaaagcacctggatagaatcgtggcactattccctaaagacgtagatcgtctgcgacgcatgtctctcatcgaggaggagggctccaagcgtatcaatatggctcacctctgcattgtaggatcccacgccgtgaacggggtcgcaaagattcatagtgacatcgtcaagactaaagtattcaaggacttctccgagctggagcccgacaaattccagaacaagacgaacggtataacgccccgccgctggctgcttttatgcaaccccggcctagccgagctgatcgccgaaaagattggagaagattatgtgaaggacctgagccaattgaccaaactccattccttccttggagacgatgtttttctcagggagttggccaaagtcaagcaggagaacaagttaaagttcagccaattcttggaaaccgagtacaaggtcaaaattaacccttcttctatgttcgatgtccaggttaaacgtatacacgagtacaagaggcagctcttgaactgcctccacgtcatcacaatgtacaataggatcaagaaagacccaaagaagctctttgtgccccgtaccgttatcatcgggggcaaggccgcccccggttaccacatggccaagatgatcatcaagctgatcacctccgtggcggatgtggtcaacaacgaccccatggttggatctaagctgaaggttattttcttggaaaactaccgcgtttccctcgcagagaaggtgatccctgccaccgacctgtccgagcaaatctcgactgctggcactgaagcctctggcacaggtaatatgaagttcatgttaaacggtgcccttaccatcgggaccatggatggagccaacgttgagatggctgaggaggccggcgaggagaaccttttcatctttggcatgcgaatcgatgacgtcgccgcgctggacaagaagggatatgaggctaaggagtactacgaggcactgccggaattaaagctggtgatcgatcaaatcgataatggattcttcagtcctaagcagcccgacctctttaaggacatcataaacatgctgttctatcatgaccggtttaaggtctttgctgattacgaagcttacgtgaaatgccaggataaggtcagccaactctacatgaaccctaaggcgtggaacacgatggtgctgaaaaacattgctgcctccggcaaattttcctctgatcgcaccatcaaggagtacgctcagaacatctggaacgtcgagcctagcgatctcaagatcagtctttcaaacgaaagtaacaaggtgaatggaaac

SEQ ID NO: 250868 - DNA, 2541 bp, synthetic construct
  misc_feature 1..2541: note = Description of Artificial Sequence: Synthetic coding sequence
  source 1..2541: mol_type = other DNA
atggcaaagccactaacagaccaggaaaaaaggcggcaaatttcaattcgtggaattgtcggtgttgaaaacgttgccgaactcaagaaatctttcaaccgtcatctacactttacgttggtgaaggataggaatgtcgctacaacccgcgattattacttcgctctggcgcataccgtgagggatcacctcgtcggtagatggatcagaacacaacaacactactatgataagtgtcccaagcgtgtatattatctctctctcgaattttatatgggacgtactcttcaaaatacgatgatcaacctcggactccaaaacgcttgtgacgaagcaatttatcagttagggcttgacatagaagaattggaagaaattgaagaggacgctggactaggaaatggtggacttggccgtcttgctgcttgcttccttgattccatggccactctgggattggccgcctatggatatggcatccgctatgagtatggaattttcaaccagaagatacgggatggatggcaagttgaagaggctgacgactggctgaggtatggtaacccttgggaaaagtcgaggccagagtttatgctaccagtccacttttacggaaaagtagaacacactaatactggtaccaaatggatagacactcaggttgtactcgctctcccatacgacacgccagtccctggatatatgaacaacactgttaacacaatgagactttggtcagcccgtgctcctaatgattttaatctacgtgattttaatgttggagattacattcaagcggtcctggatagaaatttggccgaaaatatatcacgggtgttgtatccaaacgacaatttcttcgaaggaaaggaattgagattgaagcaagagtactttgtcgtggcagcaacactacaagatattattagacgattcaaagcgagtaaattcggttccacacgaggagcaggaacagtctttgatgcgttcccagatcaagtcgcaatccaacttaatgatacacacccagctttggctattccagagctcatgcgtattttcgtggacattgagaaattaccttggtccaaggcatgggagttgacccagaagacgtttgcctatactaaccatacagttctcccagaggcacttgaacgttggccagttgatttggtagaaaaacttttaccacggcacttggaaattatttacgaaattaaccagaaacatctagaccgtattgtagctttgttcccaaaggacgtggaccgtttgcgtcgaatgtccttgatagaagaagagggatctaaacgaattaacatggcgcatctatgcattgttggctcccatgcagttaacggagtggctaagatccattccgatatagtcaagactaaagttttcaaggatttttcggaacttgaaccggacaagttccaaaataagaccaacggaataacaccacgtagatggttgttgttgtgtaacccaggtctcgctgagttaatcgcagagaaaattggagaagattacgttaaagatctttcgcagctgactaaacttcactccttccttggagatgatgtgtttctcagggaactagcaaaggttaagcaggaaaacaagctcaaatttagtcagtttcttgaaaccgaatataaggtcaagattaatccaagcagcatgtttgatgtccaagtaaagcgcatccacgagtataaaaggcaattactcaattgtttgcacgtcatcacgatgtataatcgtataaagaaggaccctaaaaaattgtttgtgccaaggacagtgatcatcggaggaaaagcagcacctggatatcatatggctaaaatgattatcaaacttatcacctccgttgcggatgtagtaaataatgatcctatggtgggatcaaaactaaaagttatatttttggaaaattatagagtttctttagctgaaaaggttatacccgcgactgatttgagtgagcaaatttcaacagcgggtacggaagcaagtggtacaggaaatatgaaatttatgcttaatggtgcgttaactatcggaacaatggatggagctaatgtggaaatggcagaagaagcaggtgaggagaatctgtttattttcggaatgcgaattgatgatgtcgctgctctcgataaaaaaggatatgaagcaaaggaatactatgaagccttaccagaactcaagctcgttattgatcaaatcgacaacggtttcttctctccaaaacaacctgatctgtttaaagatataatcaatatgcttttttaccatgatagattcaaggtgttcgcagattatgaagcctatgttaagtgccaagataaggtatctcaactgtacatgaacccaaaagcttggaatacaatggttctaaaaaatattgcagcctcaggaaagttctcatctgatcgcactattaaggagtacgctcagaacatttggaatgttgagccgagtgatctgaaaatctcattgtcgaatgaatcaaataaagtcaacggcaat

SEQ ID NO: 250869 - DNA, 2541 bp, synthetic construct
  misc_feature 1..2541: note = Description of Artificial Sequence: Synthetic coding sequence
  source 1..2541: mol_type = other DNA
atggcaaagccgctcaccgaccaggagaagagacgccaaatcagcattcgcggtatcgtgggagtggagaacgtcgcggaactgaagaaatccttcaatagacacctccactttacgctcgtgaaggatcggaacgtggcgactacgcgggattactactttgcgctcgcccacacggtgagagatcacctcgtcggtcgctggattcgcacccaacagcactactacgacaaatgcccaaagcgcgtctactacctgagcttggaattctacatgggacggactcttcaaaacactatgatcaacctgggcctgcagaacgcgtgcgacgaggccatctatcaattgggacttgatatagaggagctggaggaaatcgaagaggacgcaggactggggaacggggggctgggtcgtctcgcagcctgtttcctcgatagcatggccactctgggtttggctgcatacggctacgggatcagatacgaatacggaatattcaatcagaagattcgcgacggatggcaggtcgaagaagcagacgactggctgcggtacggaaacccgtgggagaaatcccgccccgagttcatgctgccagtacatttctacggcaaggtggaacacactaataccggaactaagtggatcgatacccaggtcgtgctggccttgccttacgatacccctgtgccgggatacatgaacaataccgtgaacaccatgcgcctgtggtccgcccgcgccccaaatgacttcaacctccgcgacttcaatgtcggcgattacatccaggcggtgttggacagaaatctggcagagaacataagtcgggtcctgtacccgaacgacaacttcttcgaaggaaaggagctgaggctgaaacaagagtacttcgtcgtggcagctacccttcaagatatcatcaggcgctttaaggcgagcaagttcgggtcgaccaggggcgctgggaccgtgttcgatgctttcccagaccaagtcgcgatccagttgaatgacacccacccagccctggcgattccggagctgatgaggatttttgtggacattgaaaaactgccctggtcaaaggcatgggaactgactcagaaaactttcgcgtacaccaaccataccgtcctccctgaggcgcttgaaagatggcctgtggaccttgtggagaagctgctgccaagacacctcgagatcatttatgaaatcaaccagaagcacctcgatcgcatcgtagccctctttcctaaggacgtcgaccggctgagaaggatgtcactgatcgaagaagaaggatccaaacggatcaatatggcccatctgtgtatcgttggctcccacgcggtgaacggcgtggcaaagatccatagcgatatcgtgaaaaccaaggtgttcaaggatttctcggagctcgaaccggataagtttcagaataagaccaatggcatcacgccgcggcgctggcttctgctctgcaatccgggactcgctgagctgatcgcagaaaagatcggtgaggactacgtgaaggatctctcgcagctcactaaacttcatagcttcctgggagacgacgtttttctcagagagctggctaaggtgaagcaggaaaacaagctcaagttttcgcagtttctcgagactgaatacaaagtgaaaatcaacccctcctctatgttcgacgtgcaggtgaagcggatccacgagtacaaacggcagctcttgaactgcctgcatgtcatcactatgtataaccgcattaagaaggaccctaagaaactcttcgtgccccgaactgtgatcatcggcggaaaggcagccccgggctatcatatggccaagatgatcatcaagctgatcacctcggttgccgatgttgtcaacaatgatcctatggtgggctcgaaactcaaagtcatcttccttgagaactaccgagtgtccctcgccgagaaggtgatccctgcaactgacctctcggagcaaatctcgaccgctggaaccgaggcgtcaggcaccggaaatatgaagttcatgctgaatggggctcttaccattggaactatggacggagccaacgtggaaatggcggaagaagccggtgaagagaacctgttcatcttcgggatgcggatagatgatgtggccgcacttgacaaaaagggatacgaagccaaagaatactacgaagccctgccagaactcaagctcgtaatcgaccaaatcgataacggtttcttttcccctaagcaaccggacctgttcaaggacatcatcaatatgctgttctaccacgacaggttcaaagtgtttgcagattacgaagcctacgtgaaatgtcaggacaaagtttcccagctttacatgaacccgaaggcgtggaataccatggtgctcaagaacatcgccgcttccggaaaattctcgtcggataggactatcaaggaatacgcccagaacatttggaacgtggaaccaagcgacttgaagataagcctcagcaatgagagcaataaggtgaacggcaac

SEQ ID NO: 250870 - DNA, 2541 bp, synthetic construct
  misc_feature 1..2541: note = Description of Artificial Sequence: Synthetic coding sequence
  source 1..2541: mol_type = other DNA
atggcaaaaccgctgacagaccaggaaaaacgaagacagatcagcattaggggtatcgtaggtgtagagaacgtggcagagctcaagaaaagctttaacaggcacttgcacttcacgctcgtcaaagatcgcaacgtcgccaccacaagagactattactttgcgctggctcacactgtccgcgaccacctagtgggtagatggatcaggacacagcagcattactacgacaagtgtcccaaaagggtgtattacttgtccctggaattctacatgggtcgaaccctccagaacaccatgatcaacctgggcctgcaaaatgcatgtgatgaagctatttaccagttggggctggatatcgaggagctcgaggaaatcgaggaagacgcaggcctggggaatgggggtttagggcgactggcagcatgctttttagatagcatggccaccctgggtttagctgcttatggatacgggattaggtacgagtacggaatatttaatcagaagatccgcgacggatggcaggttgaggaagctgacgattggctgcgctacggaaatccttgggagaagagtaggcctgaattcatgttacccgtccacttctatggaaaggtcgagcacacaaacactgggaccaaatggatagacacacaggttgttctcgctctgccctatgatacaccagtgcctggctacatgaacaacactgtgaacaccatgcgcttgtggtccgctcgggcccccaatgatttcaatctacgtgattttaatgtcggcgattatatccaggcagtcctggaccggaacctcgccgagaatatatccagggtgctctatcctaacgataacttcttcgagggtaaggagcttcgcctcaagcaagagtacttcgtcgtggctgccaccttgcaggatatcatccggaggttcaaagcctctaagtttggctccactcgtggcgcgggtacagtatttgacgccttcccagaccaggtggcgattcagctgaatgatactcaccccgcattggccataccagagcttatgcgtatatttgtggatattgagaagttgccttggagcaaggcttgggagctaacccaaaaaacctttgcctatacaaatcacacagtcctccccgaggcactagaaagatggcctgttgaccttgtcgaaaagctcctgccacggcatctggagatcatttacgaaatcaaccagaaacatcttgaccggattgtcgccctgtttcccaaggacgtggaccggctccgtaggatgtcactgattgaagaggaaggatccaaacggataaatatggcacacctgtgcattgtcggctcccacgccgtgaatggagtagctaaaattcacagcgatatcgtaaagacaaaggtttttaaagacttcagcgaactggaaccagataagttccagaacaagacaaacggtatcacccctcgccggtggctgctgctgtgcaacccaggactggcagagttgattgcagagaaaattggggaagattatgtgaaagatctgtcccagctcaccaagctacactcatttcttggggacgacgtgttcctgagagaactcgccaaggttaaacaggaaaataagctaaagttttcccagtttttggagaccgaatacaaagtcaagatcaacccatcttctatgttcgacgttcaggtcaagcgcatacacgagtataagcgacaactcctcaattgcttgcacgtgatcacgatgtacaaccggatcaagaaggaccccaaaaagctgttcgtcccaagaactgtaattatcggcggaaaagccgctcctggctaccacatggcgaagatgatcattaagcttatcacatcagtggccgacgtggtaaataacgaccccatggtggggagcaagctcaaggtaatattcttggagaactaccgggtctccttggccgagaaggtgatcccggccaccgacctaagcgagcagattagcacagctggcaccgaggcatcagggactggaaatatgaagttcatgctaaacggagctctcaccatcggcacaatggacggagccaatgtggaaatggctgaagaggcaggcgaagaaaacttattcatattcggcatgagaattgatgacgtagctgctctcgataagaaggggtatgaagctaaggagtattacgaagcgcttcccgagttgaaattagtgatcgaccagattgataacggcttcttctcgccaaaacaaccagatctattcaaagacatcatcaatatgctgttctaccatgaccgctttaaagtgttcgctgactatgaggcatacgtgaagtgccaggataaggtgtctcagctttacatgaatcccaaagcctggaatacaatggtccttaagaatattgcggcatcaggaaagttcagctcagatagaactataaaagaatatgcccagaatatttggaatgtggaacctagcgatttgaagatcagtctgagtaacgaaagtaataaggtgaacggtaat

SEQ ID NO: 250871 - DNA, 2541 bp, synthetic construct
  misc_feature 1..2541: note = Description of Artificial Sequence: Synthetic coding sequence
  source 1..2541: mol_type = other DNA
atggcaaagcctctcacggaccaggagaaacggaggcaaatctcaattagaggcatcgttggagtggaaaatgtggctgaactgaagaaatccttcaataggcatctgcatttcacgctcgtgaaggatcgcaacgtcgcaactacgcgggattactatttcgcgctggcgcacaccgttcgggaccacctggtgggccgctggatcagaacccagcagcattactacgataagtgcccaaaacgcgtgtactacctctccctggagttctacatgggacgcactctgcaaaatactatgatcaatctgggactccaaaacgcctgcgacgaggccatctaccaactgggacttgacattgaggaacttgaggaaatcgaggaggacgcaggactcggcaacggcggcctgggaaggctcgcagcctgcttcctcgattcgatggctacgctcggactggctgcctacggatacggcatccgctacgagtacggaatcttcaatcagaaaatcagagacgggtggcaggtggaagaggcagacgactggctccggtacggcaacccgtgggagaagagccgcccagaattcatgctgcccgtccatttctacggcaaggtggaacacaccaataccggaactaaatggatcgatactcaggttgtcctggcgctgccatacgacaccccggttcctgggtacatgaataacaccgtgaatactatgagactctggtccgcccgcgccccaaatgacttcaacctccgggacttcaacgtcggggactacatccaagcggtcctggaccggaacctggctgagaacatctcaagagtgctgtacccaaacgataacttctttgaggggaaggaactgcgcctgaagcaggaatacttcgtggtggcggcgaccctgcaagacatcatcaggcggtttaaggcttcaaagttcggctcgacgcggggcgcggggaccgtgttcgatgcattcccagatcaagtggcaatccaactcaacgatacccacccggcgctcgcgatccccgagctcatgagaatcttcgtcgacatcgagaaactcccctggtccaaggcctgggagcttactcaaaagactttcgcatacactaatcacactgtgctgccggaagcgttggaacggtggccggtcgacctggttgagaagttgttgcctagacatctcgagatcatctacgagatcaaccaaaagcatttggatcgcatcgtggcactcttcccgaaggatgtcgacagacttcggcggatgtcgctcatcgaagaggagggctccaagcgcatcaacatggcccatctttgtattgttggatcgcacgccgtgaatggcgtggctaagattcactcggacatcgtgaaaaccaaggtgttcaaggacttcagcgaactcgaaccagacaagttccaaaacaaaactaatggaatcaccccgcgacgctggctcctgctctgcaatccaggactcgccgaactgattgcagaaaagatcggtgaagattacgtcaaggacctgtcgcaactcaccaaactccacagcttcctgggggatgacgtgttcttgcgggagttggctaaggtcaagcaggaaaacaagctgaagttttcccagttcctcgagactgaatacaaagtgaaaatcaacccgtcgagcatgtttgacgtacaggtgaagcgcatccacgaatacaagcggcagctgctgaactgcctgcatgtgatcaccatgtacaacagaatcaagaaagatcctaagaagctgttcgtccctcggacggtcataatcggagggaaggcggcccctggataccacatggcaaagatgatcatcaagctcatcacctcggttgccgacgtggtgaataatgatccgatggtcgggtccaaactcaaggtgatcttcctcgagaactaccgagtgtctctggccgagaaggtgatcccagcgaccgatttgtcggaacaaatatcgacggctggaaccgaggcttcaggtaccggcaatatgaagttcatgctgaatggggcactgaccatcggcactatggatggagcgaatgtcgagatggcggaagaagcgggtgaagaaaacctgttcatcttcggaatgaggattgacgacgtggcagctctcgacaagaagggatacgaagcaaaagaatactacgaggccctgccggaactcaaacttgtgatcgaccaaattgacaacggcttcttttcacctaaacaaccggacctgttcaaggacatcattaacatgctgttctaccatgacagattcaaagtgttcgctgactacgaagcctacgtgaagtgtcaggacaaggtgtcacaattgtacatgaacccaaaagcctggaatactatggtgctgaaaaacatcgccgcaagcggaaaattcagctccgaccgaaccataaaagagtacgcacagaacatttggaatgtggagccctccgatctgaaaatcagcctttcaaacgagtctaacaaggtgaatggaaac

SEQ ID NO: 250872 - DNA, 2541 bp, synthetic construct
  misc_feature 1..2541: note = Description of Artificial Sequence: Synthetic coding sequence
  source 1..2541: mol_type = other DNA
atggcgaagcccttgactgaccaggagaagcggaggcagatctccataaggggcatagtgggggtggaaaatgttgcagagcttaagaaaagctttaatagacacctgcacttcaccctggttaaggataggaacgtggccaccacccgtgactactatttcgcgctggcacacaccgttagggatcacctggtggggaggtggatcaggacacagcaacattactacgacaaatgccctaaacgagtatactatctgagcctggagttctacatgggacgcacattgcaaaacacgatgatcaacttgggactgcagaacgcatgtgatgaagcaatttatcagcttggcctggacattgaggagttggaagagattgaggaggacgctggcctgggaaatggaggtctcgggagactggcagcttgctttctggactctatggctactttgggtttggcagcatatggctatggcattaggtacgagtacgggatttttaaccaaaagatacgggatggatggcaggtcgaggaggctgacgactggctccggtatgggaacccctgggaaaagagccgccctgaattcatgctgcctgtgcatttttacggaaaggtggagcatacaaacaccgggaccaagtggatcgatacccaggttgtcctcgccttgccatacgatacccctgttcctggatacatgaacaataccgtcaacaccatgcggctgtggagcgctcgggcccccaacgattttaacctgagggattttaacgtgggggattacattcaagccgttctcgatagaaatctagccgagaacatttcaagggtgctctatcccaacgacaacttcttcgaaggaaaagaactgaggctgaagcaggagtactttgtcgtcgcagctacacttcaggacattattcgccggtttaaagctagcaaattcggatccaccaggggagcaggcacagtgtttgacgccttccccgaccaggttgcgatccaattaaacgatacacatcctgctctggctatccctgaactcatgagaatatttgttgatatcgagaaactgccttggtcaaaggcttgggagctcacacagaaaaccttcgcttacaccaaccataccgtactcccagaggctttggaacgatggcctgtggacctcgtggagaagctccttcccaggcaccttgaaatcatatacgagatcaatcagaaacatcttgatcggattgtcgcactcttccccaaggacgtcgataggctccgcagaatgtcactgatcgaggaagagggatccaaaaggattaacatggcacacctgtgcattgtggggagccacgccgtgaacggtgtggcaaagattcatagcgacatcgttaaaaccaaagttttcaaagacttcagcgagctggaaccagacaaattccagaataaaacgaacgggataacccctcgcagatggctgttactctgtaaccctggcctggcagagcttatcgccgaaaagatcggagaggattatgtcaaggacctttctcagttgaccaagcttcactcctttctcggtgacgatgtgtttctcagggagttggcgaaggtaaaacaggaaaataagctgaaattttcacagttcctcgagactgagtacaaggttaagatcaacccctctagtatgtttgatgtccaagtgaaacgaattcacgaatacaaaagacaattgctgaactgtcttcatgttatcacaatgtacaaccggataaagaaggacccaaagaagctgtttgtccccaggactgtgatcatcggcggtaaagcggctcctgggtatcatatggccaaaatgatcatcaaattaattacgtccgtggccgacgtcgtcaataacgaccctatggtagggagcaagctgaaagtgattttcttggagaactatagagtctcacttgcagagaaggttatacccgctaccgatctcagcgagcagatttcaaccgccggaaccgaggcgtcaggtacaggtaatatgaagtttatgctgaacggtgcactgactataggaaccatggatggagcaaacgtggaaatggcagaagaagctggcgaggagaatctattcatatttggcatgaggatagacgacgtcgccgcccttgacaagaaaggctacgaagccaaagaatactatgaagctcttcctgaactcaaactcgtgattgatcagatcgacaacggattcttttctccgaaacagccggatctttttaaggatataataaacatgctgttctatcacgaccgctttaaggttttcgctgactacgaggcttatgtaaaatgccaagacaaagtcagtcagctgtacatgaaccccaaagcttggaacaccatggtcctgaagaatatagccgccagcgggaaatttagttcagacaggaccatcaaggagtatgctcaaaacatctggaacgtggagccaagcgatttgaagatctctttgagtaacgagagcaataaagttaacgggaac

SEQ ID NO: 250873 - DNA, 2541 bp, synthetic construct
  misc_feature 1..2541: note = Description of Artificial Sequence: Synthetic coding sequence
  source 1..2541: mol_type = other DNA
atggccaagcctctgaccgatcaagaaaagagaaggcagatcagtatcaggggcattgtgggcgtcgagaatgtcgctgagttgaagaaatctttcaataggcacctgcacttcaccctggtgaaggatagaaatgtcgccactacacgagactattatttcgccctggcgcacactgttagggaccacctcgtggggcgctggattagaacacagcagcattactacgacaagtgcccgaaacgcgtgtattatcttagcctcgagttctacatgggccgaacacttcaaaatacgatgatcaatttgggcctccaaaacgcatgcgatgaagccatctaccagcttggcctggacatcgaggaactggaagaaatcgaagaggatgctgggctgggcaacggaggactgggtcgactggccgcttgcttcctggactctatggcgaccttgggcttggccgcttacgggtatggaatccggtacgaatacggaatattcaaccagaagattagagacggatggcaggtggaggaggctgatgattggttgagatatggtaacccctgggaaaaaagccggccagaattcatgttgcctgtccatttctacggaaaggtggagcacactaataccggtacaaagtggatcgatacccaggtcgtgctcgctctgccgtatgatacgccagtgccgggctacatgaacaacacagtcaatactatgaggctgtggagcgcaagggcccccaatgactttaatctccgagattttaatgtgggagattacatacaggctgtcctggaccgcaatctggcggaaaacattagcagagtgctgtacccgaacgacaacttcttcgaggggaaggaactgaggctcaaacaggagtacttcgtggtcgccgccacactgcaagatatcatccgccgcttcaaggcatctaaattcggatctacgagaggcgccggcacagtcttcgacgcctttcccgatcaagtggctattcagctcaacgatacccatccagccctggccatccccgaactgatgcgaattttcgtggatattgagaaactgccgtggagtaaagcttgggaactgacacagaagacatttgcatacacaaaccacaccgtgctcccagaggcactcgaacggtggcctgtggatctggtcgaaaagcttctgccccgacacttggagattatctacgaaatcaaccagaagcacctcgacagaatagtggccctcttcccaaaggatgtggacaggctccggcgcatgagtctgatcgaagaggaagggagtaaaagaatcaacatggcccatctttgtattgtcggatcccatgccgtcaacggggttgcaaagattcactccgatatcgttaagacaaaagtgttcaaagacttttcagaacttgaacccgataaatttcagaataaaaccaacggtatcacgccccgcaggtggctcctgctgtgtaaccctggcctggccgagctgatcgccgagaagattggtgaagattacgtgaaggatctttctcagcttaccaaactccattcattcctgggcgatgacgttttcctgcgcgaacttgcaaaagtcaaacaggagaataaactcaagttttctcagttcttggaaaccgaatataaggtcaagattaatccatcatccatgtttgacgtgcaagtcaaaagaatccatgaatataagagacagctgctgaactgtcttcacgtaataactatgtataacaggatcaagaaagacccaaagaagttgttcgtgcctcgaacggtcattataggaggtaaggctgcacccggctaccacatggcaaagatgatcatcaaactgatcacttctgtagccgacgttgtgaacaacgatccaatggtggggagcaagttgaaggttatctttctggaaaattacagggtgagtctcgccgagaaggtgatacctgcaaccgatctgagcgagcagatttcaaccgccggaactgaagcctctgggaccgggaacatgaaatttatgctcaatggggctctgacaatcgggaccatggacggcgccaacgtcgaaatggccgaggaagccggcgaggaaaacttgtttattttcggaatgcgcattgacgacgtagcagcacttgacaagaaaggttacgaggccaaggaatactatgaagctctgcctgaactgaaacttgtcatcgaccagattgacaatggattcttctccccaaagcagccggacctgttcaaggacatcattaatatgctgttctaccacgaccgcttcaaggtgttcgccgattatgaagcatacgttaagtgtcaggataaggtgtcacaattgtacatgaacccaaaagcctggaacacaatggtgctgaagaatatcgccgccagcggtaagtttagcagcgacaggaccataaaggagtacgcgcagaacatttggaacgtcgagccaagcgacctgaaaatttccctttccaacgaatcaaacaaagttaacggcaac

SEQ ID NO: 250874 - DNA, 2541 bp, synthetic construct
  misc_feature 1..2541: note = Description of Artificial Sequence: Synthetic coding sequence
  source 1..2541: mol_type = other DNA
atggccaaacctctcacggatcaggaaaaacggcgccagatatccatccgagggatcgtaggagttgaaaacgtcgcagaactcaaaaaatccttcaataggcatctccactttactcttgtcaaagatagaaacgtagccacgactagggattactacttcgccctcgcacacacagtaagggatcatttggtcgggaggtggatccggacacagcagcattattatgataagtgtcccaaacgcgtctactacttaagtctcgaattctatatgggacgaactctccagaacacaatgatcaacctcggactccagaacgcatgcgacgaggcaatctaccaactggggctcgatattgaggaactagaggaaatagaagaagatgctggactgggaaacggggggctggggagactggccgcatgtttcttagactcaatggctactctcgggcttgccgcctatgggtatgggatcagatatgaatatgggatattcaaccagaaaatccgggatggatggcaggtggaggaagcagatgattggctaaggtatgggaacccttgggagaaaagtaggcctgaatttatgctgcccgtgcatttttacggaaaagtggaacatacaaacactgggactaaatggatcgatacacaagttgtcctcgccctaccctatgatactcctgtgcccggatatatgaataacacagtgaatactatgagattgtggtctgctcgggctcctaacgacttcaacttacgagatttcaacgtgggagattatattcaggctgtgctcgacaggaaccttgcggaaaatatttcaagagtattatatccaaacgataacttcttcgaagggaaagagctacgcttaaaacaggaatatttcgtggtggcagctactctgcaggatataattagacggttcaaagctagtaaatttggatccactaggggggccggaactgtgttcgatgccttccctgatcaggttgctatccaattaaacgatacacatcccgccctggcgattcccgaactcatgcggattttcgtggatatcgaaaagctgccctggtcaaaagcatgggagttaactcagaagacatttgcctatactaaccacacagtactccccgaagccctcgaacgatggccagttgatctggtagaaaaactgctcccccggcatcttgaaataatatatgaaatcaatcaaaaacatctggatcggatcgtagctctgtttcctaaagatgtcgatcggcttaggaggatgagtcttatcgaggaagagggatccaaacgcataaatatggcacacctgtgcatcgtgggatcacacgcagtcaacggagtggcaaaaatacattctgatatagtcaaaacaaaggtattcaaagatttctcagaactggaaccagataagtttcagaacaaaacaaatggaattacaccgcgccggtggcttctcctctgcaatcccggactggctgaactgatagccgaaaagataggggaagattatgtgaaagatctctctcagcttacaaaactgcattcattcctgggagatgatgtgtttttacgcgaactagctaaggtcaaacaggaaaataaactcaaattctctcagttcctcgaaactgaatataaagtgaaaatcaatccttccagtatgtttgatgtgcaggttaaacggatccacgaatataaaaggcagctccttaactgcctgcacgtgatcactatgtacaacaggattaagaaagatcctaagaaactgttcgtgccccgaactgtaataataggagggaaagccgctccagggtatcacatggccaaaatgatcatcaaacttattacgtcagtggcagatgtcgttaacaacgatcctatggtcgggtctaagctcaaagtgatatttctcgaaaactaccgggtcagtcttgctgaaaaagtaatacccgccacagatttatcagagcagatctccacagctggaactgaagcctccgggactggaaatatgaaattcatgctaaatggggcactaacaatagggactatggacggagctaacgtggagatggccgaagaggccggagaggaaaacctctttatttttggaatgcggattgatgatgtcgccgctcttgataaaaaaggatatgaggctaaagaatattacgaagcattgccagaactgaaactagtcatcgaccaaatcgataacggattcttctctccgaaacagcccgatctatttaaagatatcataaacatgctgttctaccatgataggttcaaagtattcgcagattatgaagcctatgtcaaatgccaggataaagtgtctcagttgtatatgaaccctaaagcttggaatactatggtcctcaaaaatattgccgcctcagggaaattttcttcagataggacaatcaaggaatatgcccagaacatctggaatgttgaacctagtgatttaaaaatctctctgtctaatgaatctaacaaagtaaacgggaac

SEQ ID NO: 250875 - DNA, 2541 bp, synthetic construct
  misc_feature 1..2541: note = Description of Artificial Sequence: Synthetic coding sequence
  source 1..2541: mol_type = other DNA
atggctaagcctctgaccgatcaggaaaagagacgtcagatctcgatcaggggaatcgtcggtgtggagaacgtcgctgagctgaaaaagtccttcaaccgccacctccattttactcttgtcaaagatagaaacgtggcgactacccgggattactacttcgcactcgcccacaccgtcagggaccacctggtgggacgctggatccggactcagcaacactactacgacaagtgtccgaaacgcgtgtactacctgagcctggagttttacatgggacggactctgcagaatactatgatcaacctgggactgcaaaacgcctgtgatgaagcgatctaccagctcggacttgatatagaggaacttgaggagattgaggaggacgcgggattgggaaatggagggctgggaagattggccgcgtgctttctcgactccatggcgactctcggtcttgcagcgtacggatacggtatccggtacgagtacgggatctttaaccagaagatcagagacggctggcaggtggaagaagctgatgactggctgcgatatggaaatccgtgggagaaaagtcgcccggagtttatgctcccggttcacttctacggaaaagtggaacataccaataccgggaccaagtggattgacacgcaagtggtgcttgccctgccctacgacacgccagtcccaggctatatgaataacactgtgaataccatgcgactgtggtcggccagggcgccgaacgacttcaacctgcgggatttcaacgtgggtgattacatccaggcagtgcttgatagaaacctggcagaaaacatctcccgcgtgctctacccgaacgacaatttcttcgagggtaaagagctgagactgaagcaggaatacttcgtggtggctgcaaccctccaagacatcattcggcggttcaaggccagcaaattcggctcgacgcgcggggccggcactgtgttcgacgctttccctgaccaggtggcgatacagctgaatgacacccacccagctctggcgatcccggaattgatgcgcatattcgtagacatcgaaaagctgccatggagcaaggcttgggaactgacccaaaagaccttcgcctataccaaccataccgtgctcccagaagctctcgagcggtggccagtggatctcgttgaaaaactcttgccaaggcacctggaaatcatctacgaaatcaaccagaagcatctggacagaattgtggccctgtttcccaaagacgtcgaccgcctccgtagaatgagcttgatcgaggaggagggttccaagagaatcaatatggcccatctctgcatcgtgggaagccatgccgtgaacggagtggctaagatccactcagacatcgtgaaaactaaggtgttcaaggacttctcagaactggaaccggacaagttccaaaacaagacgaatggaatcactcctaggcggtggctcctcctgtgcaaccccggcctggctgaactgatcgcagaaaagatcggagaagattacgtgaaagacctgtcgcagttgaccaaacttcactcgtttttgggagatgacgtgtttctgcgcgaactggccaaggtgaagcaagaaaacaaactgaagttctcacaattcctcgaaaccgagtacaaggtcaagataaatccgagctccatgtttgacgtccaggtgaagcgaatccacgaatacaagaggcaactgctgaactgccttcacgtcataactatgtataaccggatcaaaaaggatcccaagaagctgttcgtccctcgcaccgtcatcatcggcggaaaggcggcacctggctaccatatggccaaaatgatcatcaagctgatcacttccgtggctgacgtcgtcaataatgatccaatggtaggatcgaaacttaaagttatcttcctcgagaattaccgcgtctccttggccgaaaaggtgatcccggccaccgatctctccgaacagatctccactgccggtactgaagcgtcaggaacggggaacatgaagttcatgttgaacggagccctgactataggaaccatggatggtgcaaacgtggaaatggcagaggaagccggggaagaaaatctgttcatctttggaatgcggattgatgacgttgcggccttggacaaaaagggttacgaggccaaggaatactacgaagctctgccagagctcaagctggtgattgaccagattgataacggcttcttcagtccgaaacagccggatctcttcaaagacattatcaacatgctgttctatcatgaccgctttaaagtgttcgcggattacgaggcgtacgtgaagtgccaagacaaagtgagccagctgtacatgaacccaaaggcctggaatacgatggtccttaagaatatcgcagcgtcggggaagttctcgtcggacaggactattaaggagtacgcgcaaaacatctggaacgtggagccttcggatttgaagatcagcctgtccaacgaatcgaataaggtcaacggaaac

SEQ ID NO: 250876 - DNA, 2541 bp, synthetic construct
  misc_feature 1..2541: note = Description of Artificial Sequence: Synthetic coding sequence
  source 1..2541: mol_type = other DNA
atggctaaacctctgactgaccaggagaagcgccggcagatcagcattcgtgggatcgtcggtgttgaaaatgtggcagagttgaagaagagcttcaacagacacctgcactttacgctggtcaaggacaggaacgtggctactacccgcgactattactttgcgctcgctcatacggtgcgcgaccacctagtgggacgctggatccgcacgcaacagcactactacgacaaatgcccgaagcgcgtgtactacctgtcgctggagttttacatgggacgcaccctccagaacaccatgattaacctggggctgcagaacgcctgcgacgaggcaatctatcagctggggctggacatcgaggagttggaggaaattgaagaagacgcgggcctcggtaacggtggtctgggccgcctggctgcgtgttttctggatagcatggccactctgggattggcggcttacgggtacggtattaggtacgaatacggtatatttaatcaaaaaatcagggacggatggcaagttgaagaggcggatgactggttgcgctatggcaatccatgggaaaagagccgaccagaattcatgctgcctgtccacttctatggcaaagtggaacacaccaatacaggtactaaatggattgatacccaggtcgtcctggccttgccatacgatacgccagtgccgggttatatgaataacacggtgaacacgatgcgcctgtggtccgcgagagcgcctaatgacttcaatctgcgagactttaacgtcggtgattacattcaagcggtcctggatcgcaatctggcagaaaatatttcccgggtcctgtacccgaacgataacttctttgagggaaaggaactgcgcttgaaacaggaatacttcgtggtcgctgcaactctccaagatatcattcgtcgtttcaaggccagtaaattcgggtcgacccgcggcgcaggtaccgtgttcgacgcgttcccagaccaggtggcgatccagctgaacgatacccaccctgcgctcgccatacctgaacttatgcgtatttttgtggacatcgaaaaacttccttggtctaaagcatgggaactgacccagaagaccttcgcgtacaccaatcacacggttttgcctgaggcgctggagcggtggccagttgatttggtggagaagttactgccacgtcatctggaaattatctacgaaattaatcagaagcaccttgacagaatcgtggcgttgttccccaaagacgtggatcgcctgcgccggatgagcctgatagaagaggaaggtagcaagcggattaacatggcgcatctttgtatcgtaggttcacacgcagttaacggggtggctaagatacatagcgacattgttaagaccaaggtttttaaggattttagcgagctggaacctgataaatttcagaataagaccaacggcatcaccccgcggcgctggctactgctgtgtaacccgggcttagctgaattaattgcggagaagattggcgaggactacgtcaaagacctaagccagctgaccaaattgcactccttcctgggcgacgacgtgttcttgcgcgagcttgctaaagttaagcaggaaaacaaactgaaattctctcagtttttagaaaccgagtataaggtcaagataaacccgtcttctatgtttgacgttcaggtaaagcgcatccacgaatataagcgccagctgctgaattgcctgcacgtaatcacaatgtataatcgcataaaaaaggatccaaaaaagttgtttgtgccgcgtactgtgattatcggtggtaaagcggcaccagggtatcacatggcaaagatgattattaagcttatcacctccgtggcggatgtggtgaataatgatccaatggttgggtctaaacttaaagtcatcttcctggaaaattaccgcgtaagcctggccgagaaggttattccagctaccgacttgagcgagcaaatttccactgcgggtaccgaggcgagcggcaccggcaacatgaaatttatgctgaacggcgcgctgactattggcactatggatggtgcgaacgtcgaaatggctgaggaggctggtgaagaaaatttgttcatcttcggtatgcgaatagacgacgtggctgccctggacaagaagggttatgaggcaaaggaatactatgaggcattgcctgagctcaaactggtcattgaccagattgataacggtttcttctctccgaagcaacctgacctgtttaaagacatcattaatatgctgttctaccacgaccggtttaaggttttcgctgactatgaagcgtacgtcaaatgccaagacaaagtgtcccagctgtatatgaacccaaaggcatggaacaccatggtactgaagaacattgccgcgtcaggtaaattctcctcagaccggactatcaaagagtacgcgcagaacatctggaatgtcgagccgtccgatctgaaaatcagcctcagcaacgaatcaaataaagtaaatgggaat

SEQ ID NO: 250877 - DNA, 2541 bp, synthetic construct
  misc_feature 1..2541: note = Description of Artificial Sequence: Synthetic coding sequence
  source 1..2541: mol_type = other DNA
atggcgaaacctctgaccgaccaagaaaagagacgccaaattagcattcgaggcatcgtgggcgtcgagaatgttgcggagctgaaaaagtcattcaatagacacctgcattttaccctagtcaaggatcgaaatgtggctacgacccgagactactactttgcattggcccacaccgtgagagaccacctcgtaggaagatggatcaggacacagcagcactattatgacaaatgtccaaaacgggtttattatttaagcctcgagttctatatgggtcgtaccctgcagaataccatgataaatctcggcctccagaatgcatgcgacgaagctatttatcagttgggcctggatatcgaggagctcgaggagatcgaagaagatgccggcctaggaaatggggggctgggcaggctggctgcttgctttctagattctatggccaccctcggactagcagcttatgggtatggaatccgttatgagtacggcattttcaatcagaaaatccgggacggatggcaggtggaagaagccgacgactggctgcgatacggcaacccctgggagaagtcacgaccagagtttatgttgccggtgcatttttacggaaaagtggaacatacaaatacaggtacaaagtggatcgacacacaggtggtgcttgccttaccttatgacactcccgttcccggatacatgaacaacactgttaatactatgaggttatggtccgcgcgggccccgaacgacttcaacctgagggacttcaatgttggagactatattcaggcggttttggatcggaacctcgctgagaacatctctagagtgctctaccctaatgataattttttcgagggtaaggaattgaggctaaaacaggaatattttgtcgtcgccgccacactacaggacattatccgacgtttcaaagcctctaaattcggttccaccagaggagccgggacggtgttcgacgcctttcccgatcaagtggcaatacaactgaacgacacacatcctgccctcgctatcccagagctcatgcggatttttgtagatatcgagaaactcccgtggtctaaagcctgggagctaacccagaagacctttgcttacacaaaccatacagtcctgcctgaggcactggagcgatggcctgttgatctggtggaaaaactgcttcctcgacaccttgaaataatatacgagattaatcagaagcatctggacagaattgtggcactctttccaaaagacgtagatcggttaaggcgcatgtccctgatcgaggaggagggatcaaagagaatcaatatggcccacctgtgcatagttggctctcatgcagttaacggagtggccaagatccactcagatatcgtgaagactaaagtgttcaaagatttcagcgaactcgaacccgataagttccagaataaaacaaatggcatcactccacgccgatggctcctgctgtgtaaccccgggctggctgaattgatcgccgagaaaataggggaagattatgtgaaggatttgtcgcagttaacaaagctacattctttcctaggggacgatgtcttcctccgagaactggccaaagtcaagcaggagaataagctgaagtttagccagttcctggaaacggagtacaaagtaaaaattaatcctagttcaatgttcgacgtgcaggttaaacgaatccacgagtataagcgacaactgctcaattgtctgcatgtgatcacaatgtataatcgaattaaaaaggaccccaagaagctgtttgtacctcggaccgtcatcatcggcggcaaagctgctcccggctatcatatggccaagatgattatcaaactaattacttcagtggccgacgttgtcaacaacgatccaatggtcgggtcgaagctgaaggtgattttcctggagaactaccgggtctcactggcagaaaaggtgatacctgcgactgatctgtccgagcagatctccactgcggggactgaagcaagcggcacgggtaatatgaaatttatgctgaacggcgctttgaccattggcactatggatggcgccaatgtggagatggccgaggaggcaggagaggagaacctgtttatcttcggcatgcggattgatgatgtagcagccctggacaaaaaaggttacgaagcaaaagagtattatgaggctctccctgagctgaaacttgtcatcgaccagatcgacaatgggttcttctcacccaaacagcccgacttgttcaaggacatcattaatatgcttttttatcatgacaggtttaaggtgttcgccgattacgaagcttatgtaaaatgtcaagataaagtgagccaactgtacatgaacccaaaagcctggaatacaatggtgctgaaaaacatcgccgcatccggcaagttcagctcagatagaacaatcaaggaatatgctcagaacatttggaacgttgaaccaagtgacctcaagatctcgctcagcaatgagtcaaacaaggtcaacgggaat

SEQ ID NO: 250878 - DNA, 2541 bp, synthetic construct
  misc_feature 1..2541: note = Description of Artificial Sequence: Synthetic coding sequence
  source 1..2541: mol_type = other DNA
atggccaagccactgacggaccaggagaagagacgccagatcagcattcggggaatcgtgggagtcgaaaacgtggctgaactgaagaaatcgttcaaccggcatctccacttcaccctcgttaaagaccgcaatgtcgctaccactcgtgattactacttcgctctggcacataccgtgagggatcatctcgtcggccggtggatccgcactcaacaacactactacgacaagtgcccgaagcgcgtgtattacctgtcgctcgaattctacatgggaaggaccttgcagaataccatgatcaacctgggactccaaaacgcttgcgacgaagcgatctaccagctgggacttgatattgaagagcttgaggagatcgaagaggatgcaggcctcggaaacggtggacttggccgcctggccgcttgcttcttggattcaatggcaacgctcggactcgccgcatacgggtacggaattcggtatgaatacggaatcttcaatcagaagatcagggacggatggcaagtggaggaagcagatgactggcttcgctacggaaacccttgggagaaatcgcgcccggaattcatgctgccagttcacttctacggaaaagttgaacacactaacactggcactaaatggatcgatacccaagtggtgcttgccctcccgtacgacaccccggtcccaggatacatgaacaataccgttaacacgatgaggctgtggagcgccagagcccctaatgactttaatctgcgggacttcaatgtgggagactacatccaagccgtccttgacagaaacctggccgagaatatcagcagggtgctgtacccgaacgataactttttcgagggaaaggaactgaggcttaaacaggaatacttcgtggtcgccgccaccctgcaggacataatccggcggtttaaggcctccaagttcggctcgacccgcggagcgggcaccgtgtttgatgcattcccagaccaagtcgcaatccagctcaacgacacccatccagcgctggccatccccgagctgatgaggatctttgtggatatcgagaaactcccgtggtcgaaggcttgggaactgactcaaaaaacctttgcctacactaaccacactgtcctcccggaggcgcttgagcgctggccggtcgacctggtcgagaagttgctgccgcggcatctcgagatcatctacgaaatcaaccaaaagcatctggaccggatcgtggctctgttcccgaaagatgtcgatcggctgcgccggatgtcactcatcgaagaggaaggatccaaacggatcaatatggcacacctttgtatcgtgggatcacacgcggtcaacggagtggccaagatccactcagacatcgtgaaaaccaaagtgtttaaggatttctccgagctggaaccagataagtttcagaacaaaactaatggaatcaccccgcgccggtggctgctgctgtgcaaccctggcctcgccgaactgatcgcggagaagatcggtgaggactacgtgaaagacctttcccaactcacgaagctgcactccttcctgggcgacgatgtctttctccgagaactcgctaaggtgaaacaagagaacaagctgaaattctcgcaattcctcgagacggagtacaaggtgaaaatcaacccctcctctatgtttgacgtccaggtcaagagaatccacgagtacaagcgccagctgctgaactgcctccatgtgatcactatgtacaacagaattaagaaagatccgaagaaattgttcgtcccgcgcaccgtgatcatcggcggaaaggcagcaccgggataccacatggcgaagatgatcatcaagctgatcacttccgtagcggacgtggtcaataacgatcccatggtgggctcaaagctgaaagtcatcttcctggaaaactatcgggtgagcctggctgaaaaggtgatccccgcaactgatctgagcgaacagatctctaccgcagggacggaagcatcgggcactggtaacatgaaattcatgcttaacggagccttgaccatcgggactatggacggagctaatgtggagatggccgaagaagccggcgaagaaaatcttttcatcttcggtatgcgcatcgacgacgtggccgcactggataagaaggggtacgaagcaaaagagtactacgaagctctgcctgagctcaaactcgtgatcgaccagattgacaatgggttcttctcaccaaagcaacctgacctcttcaaggacatcatcaatatgctgttctaccacgaccgcttcaaagtgttcgcagactatgaagcatacgtgaagtgtcaagataaggtgtcccagctgtacatgaaccctaaagcgtggaacactatggtgcttaagaatatcgctgcgtccggtaaattctcgagcgaccgcacgatcaaggaatacgcgcagaacatctggaatgtcgagccgtcggaccttaagatctccctttccaacgaatcaaacaaggtcaacggcaac

SEQ ID NO: 250879 - DNA, 2541 bp, synthetic construct
  misc_feature 1..2541: note = Description of Artificial Sequence: Synthetic coding sequence
  source 1..2541: mol_type = other DNA
atggccaagcctttgacggatcaggaaaagagacgccagataagcattagaggaatcgtcggagtcgaaaatgttgcagagctcaagaagtcctttaaccggcacctgcactttactcttgtgaaagataggaatgtagccactacgagagattactactttgcgctggcccacactgtgcgagatcaccttgtcggtcggtggattcgtacccagcagcattactacgataagtgtcccaaacgcgtatactacctgagtctggagttttacatggggagaacgcttcaaaataccatgatcaacctgggtttgcaaaacgcatgtgatgaagcaatataccaactggggctcgacattgaggagcttgaagaaatcgaagaagatgcaggactgggcaatgggggacttggacgtctcgcggcatgcttcctggattcaatggcaactcttggtcttgcagcatacggttacggcattcgatacgagtacggtatattcaaccagaagatcagggatggctggcaagtcgaagaagccgacgactggctgcgatacggaaacccctgggagaagtcgcgacccgagtttatgctgccagtccatttctacggaaaggtggaacacactaatactggaacgaaatggattgatacccaagtggtcctggctctgccatacgatacccctgttcctgggtacatgaataacaccgtcaacaccatgaggttgtggtcagcaagggcccctaacgactttaaccttcgggacttcaacgtcggtgattacattcaagcagtcctcgatcgcaatctggccgaaaacatttcaagggtgctgtaccccaacgacaactttttcgaaggcaaggaactgcggctgaagcaggagtactttgtggtggcagcaacccttcaagacatcatccgcagattcaaggcgtctaagtttggaagcactagaggagcaggtaccgtctttgacgcattccccgatcaggtggctattcaattgaacgatactcatcctgcactggcaattcctgaactgatgaggatctttgtggatatagagaaattgccttggtccaaagcatgggaacttacgcagaaaacttttgcatacacgaaccatactgttcttcctgaggctctcgagagatggcccgttgacctcgttgaaaagttgttgccgcgtcatctggaaatcatatacgagattaatcagaaacatctggatcgcattgtcgctttgtttccaaaggatgtcgaccgcctcaggaggatgtcgctgattgaggaagagggctcaaaacgtatcaatatggcccatctttgtattgtaggttcccacgccgtgaacggagtggcaaagatccattccgatatcgtgaaaaccaaggtctttaaagatttcagcgagcttgaacctgataagtttcagaacaagaccaatggaattaccccgcgccgttggcttctgctgtgcaacccagggctggcagagcttattgccgagaagattggtgaagattacgtcaaagacctgtctcagcttaccaaacttcattcatttttgggcgatgacgtgtttcttcgagaacttgctaaagtgaagcaagaaaacaaactcaagttctctcaattcctcgaaactgagtataaagtcaagatcaatccaagctccatgttcgacgtgcaggtgaagcgaatacatgagtacaagagacaactgctcaactgtctccatgtgattactatgtacaaccggatcaaaaaggatcctaagaaactcttcgttcctagaactgtgattatcggtggaaaggccgcgcccgggtaccatatggcgaagatgatcataaaactgatcacctcagtcgcagacgttgtgaataatgatccaatggtggggtcgaaactcaaggtgatttttcttgagaactatagagtcagccttgcagaaaaggtcataccagcaaccgacctttcggaacaaatttcgactgcagggaccgaggcgtcaggaaccggcaacatgaaattcatgcttaatggagccttgaccattggtaccatggatggggcaaacgtggaaatggcagaagaagccggagaggaaaacctctttatctttgggatgcggattgacgatgtcgcagcacttgataagaaaggttacgaagcaaaagagtattacgaggctctgccagagctgaagctggtcattgatcaaatagataatgggtttttctcgccgaagcagccagacctgtttaaggatatcatcaacatgctcttttaccacgatcgtttcaaagtgtttgcagactacgaagcgtacgttaagtgccaggataaggtgtcgcagctttacatgaatccaaaggcatggaacaccatggtccttaagaatatcgccgcatccggtaagttctcatcagatagaaccattaaggaatacgcgcaaaacatctggaacgtggaaccgtcggatctgaagatttcactgtcgaacgaatcaaacaaggtgaacggtaac

SEQ ID NO: 250880 - DNA, 2541 bp, synthetic construct
  misc_feature 1..2541: note = Description of Artificial Sequence: Synthetic coding sequence
  source 1..2541: mol_type = other DNA
atggccaagcctctgaccgaccaagaaaagagacggcagatcagcatccgcggcatcgtgggagtggaaaatgtggccgaactgaagaagtcgttcaatcgtcatctccacttcactctggtgaaggatagaaatgtggcgactactcgcgattactactttgccctggcccacaccgtgagagatcacctcgtgggacgctggatcagaacccagcagcattactacgataagtgcccaaagagagtgtactacctgtcactcgagttctatatggggcgcaccctccagaatactatgatcaacctgggactgcagaacgcctgcgatgaggctatttaccaactgggtcttgacatcgaggaacttgaagaaatcgaagaggacgccggtctgggaaatggcggactcggccgcctcgctgcctgtttcctggacagcatggctaccctgggcctggctgcctacggctacgggatcaggtacgagtacggcatcttcaatcaaaaaattcgcgatggatggcaagtggaggaagccgatgactggcttcgctacgggaacccgtgggaaaaatccaggccggaatttatgctccccgtgcatttctacggaaaagtggagcatactaacaccggaactaagtggatcgacacccaagtcgtgctcgctcttccgtatgacactccggtccccggctacatgaacaacactgtcaacacgatgcggctctggtcagcgcgggcaccaaacgatttcaacctgagggacttcaacgtcggggattatatccaggcagtgctggaccggaacctcgccgaaaatatctctcgagtgctgtacccgaacgacaacttcttcgaaggaaaagagctgcgcctcaaacaggaatacttcgtcgtggccgccacccttcaggatatcatcaggcggtttaaagcatcaaagttcgggtcaactagaggcgccggaactgtgttcgacgccttcccggaccaagtcgccattcagctcaacgacacccaccccgctctcgcgatcccggagctgatgcgaatcttcgtggacattgagaaactgccgtggtccaaagcctgggagctgacgcaaaaaaccttcgcgtacactaatcacaccgtcttgccggaggcccttgagcgctggccagtggacttggtggagaagctgctcccacgccacctggaaatcatctacgaaatcaatcagaagcatctggatagaattgtggcgctgttccctaaagatgtggaccgcctgcgcagaatgtccctgatcgaggaggaaggatctaagcggatcaacatggcccatctgtgcatcgttggttcgcacgcagtcaatggtgtggcaaagattcactccgacatcgtcaagactaaggtgtttaaggacttcagcgaattggaaccggacaaatttcaaaataagacgaacggaatcaccccacggaggtggctgttgctgtgtaaccctggattggcagaactgatcgcagagaagatcggagaggattacgtaaaggatctctcgcagttgacgaaactccactcatttctgggggacgatgttttcctgcgggaactggcgaaggtgaaacaggaaaataaactcaagttttcgcaattcctggaaaccgagtacaaagttaagatcaatccttcgagcatgttcgatgtccaggtgaagagaatccacgaatacaagcgccagctcctcaactgccttcacgtcatcaccatgtacaaccgcatcaagaaggacccaaagaagctgtttgtgccccgcactgtcatcatcggaggaaaggcagccccagggtaccatatggcgaagatgatcattaagctgatcaccagtgtcgcagatgtggtgaataacgacccgatggtgggcagcaagttgaaggtgatcttcctggagaactaccgggtgtcgctcgcggaaaaggtgattccagctaccgatctcagcgagcaaatctccaccgcaggcaccgaagcgtccggaactggaaacatgaagttcatgctgaatggtgccctcaccattggaactatggatggagctaacgtggagatggcagaagaggcgggcgaagaaaacctgtttatcttcggcatgcggatcgacgacgtcgcggcactcgacaagaaaggatacgaggcgaaggagtactacgaggcgctgccggaattgaaactggtcatcgatcagatcgacaatggattcttttcacctaagcagccggacttgttcaaagacattatcaacatgctgttctaccatgatcggttcaaggtctttgcggactacgaagcctacgtgaagtgccaggacaaggtttcgcaactttacatgaatccgaaggcctggaacacgatggtcctgaaaaacatcgctgcctccggtaaattcagcagcgaccggactattaaggagtatgctcagaacatatggaatgtggaaccttcggacctgaagatctccttgtcgaacgaatccaataaggtgaacggaaac

SEQ ID NO: 250881 - DNA, 2541 bp, synthetic construct
  misc_feature 1..2541: note = Description of Artificial Sequence: Synthetic coding sequence
  source 1..2541: mol_type = other DNA
atggcgaagccactgactgatcaggaaaaacgccggcagatctccatccgcggtatcgtgggggtggaaaatgtcgcagaactgaagaaatcattcaatcggcatcttcacttcaccttggtgaaggatcggaacgtggctaccacccgcgactactactttgcgcttgcacatactgtccgggaccaccttgtgggaagatggattagaactcaacagcattactacgataagtgcccaaagcgcgtctactacctgtcgctggaattctatatgggaagaacgctgcagaacactatgatcaacctgggtctgcaaaacgcctgcgatgaagccatctatcagcttggattggacatagaagagctcgaagagatcgaggaggacgccggactgggcaatggcggacttggtcggttggcggcctgcttcctggacagcatggccactctgggactggccgcttacgggtacggtatccggtacgaatatgggatcttcaaccagaaaatacgcgacggatggcaggtggaagaggctgatgactggctgcgatacggtaacccgtgggagaagtcacggccggaattcatgttgccggtccacttttacgggaaagtggaacataccaacaccggcaccaagtggatcgacactcaagtggtcctggcgctcccgtacgatacgcccgtgcctggatacatgaacaatactgtgaataccatgaggctgtggtccgctagagcaccgaacgactttaacctcagggatttcaacgtgggagactacatccaggctgtgctggatcggaacctcgcggagaacatttcgcgcgtgttgtaccccaacgacaactttttcgagggtaaagagctccggctgaagcaggagtacttcgtggtcgccgccaccctccaagacatcattagacgcttcaaggcctcaaagttcggatccacccggggagctggaacggtgttcgacgcctttccggaccaagtggccatccagctcaatgacacccaccccgccttggcaatcccggaactgatgcgcatcttcgtggatatcgaaaagctgccctggtcgaaggcgtgggaacttactcaaaagaccttcgcgtacaccaaccacacggtgttgccggaggccctggaacgatggccggtggaccttgtcgagaagctgctgccgagacaccttgagatcatttacgagatcaatcaaaagcacctcgacaggatcgtggcgctcttcccgaaggatgtggatcggctgagacggatgtcgctgattgaagaggaaggttccaagaggatcaacatggcacatctttgcatcgtgggaagccatgccgtgaacggtgtggcgaagatccactcagacattgtgaaaactaaggtgttcaaggatttttccgaattggagccggacaagtttcaaaacaagacgaacggcatcacgccccggcgatggttgctgctgtgtaacccaggactggctgaacttatcgctgaaaagatcggagaggattacgtcaaggatctgtcgcaattgaccaagctccactcctttttgggagatgatgtgttcctgcgcgaactcgcaaaagtcaagcaggaaaacaaactcaagttctcccagttccttgaaactgagtacaaggtgaagatcaacccttcgtccatgttcgatgtccaagttaaacgcattcacgaatacaaaagacagctgctgaactgtctccatgtgattaccatgtacaaccggatcaaaaaggatccaaagaagctcttcgtgccgcgcactgtgatcatcggcggcaaggccgcaccaggataccacatggcgaaaatgattatcaaattgattaccagcgtggcggatgtcgtgaacaatgacccaatggtcgggagcaagctcaaggtgatcttcttggagaactaccgcgtgtcgcttgctgaaaaagttatccctgcaaccgacctgagcgaacagattagcaccgccggcaccgaagcctcaggaactggcaacatgaagttcatgctgaacggtgccctcactatcggcactatggacggggcaaatgtggagatggccgaagaagcaggagaggaaaatctctttatctttggaatgaggattgatgacgtcgcagctctggataagaaggggtacgaggccaaggaatactacgaggctctgccggaattgaaactcgtgatcgatcagatcgacaacggattcttttccccgaaacagccagacctgtttaaggacattatcaacatgctgttctaccatgaccggttcaaggtgtttgctgattacgaggcttacgtgaagtgccaagacaaagtctcccagctgtacatgaatccaaaggcttggaatacgatggtccttaagaatattgccgcgtcgggaaagtttagcagcgatcgcaccatcaaggaatacgcccagaacatctggaatgtggagccgtccgacctcaaaatctcgctgagcaacgaatcaaacaaggttaacggaaac

SEQ ID NO: 250882 - DNA, 2541 bp, synthetic construct
  misc_feature 1..2541: note = Description of Artificial Sequence: Synthetic coding sequence
  source 1..2541: mol_type = other DNA
atggccaaaccactgaccgatcaggaaaagcgcaggcaaatttcgattaggggaattgtgggagtggaaaatgtggcagagctgaagaagtcattcaatagacacctgcatttcactctggtgaaggataggaacgtcgcaacgactagagactactacttcgcattggcgcatactgtccgcgatcatctcgtcggacggtggatacggacccagcaacattactacgataaatgccccaagagagtctactacttgtcactggagttctatatggggcgaacgcttcagaacactatgataaacttgggacttcaaaatgcatgtgacgaagccatttaccaacttggactcgacattgaagagttggaagagattgaggaagatgcaggtcttggaaatggtggactgggtaggcttgctgcctgtttccttgattcgatggccactctgggtctggcagcttacggttacggcattcgatacgaatatggcatctttaaccaaaagatccgtgatggttggcaggtggaagaagccgatgactggctgaggtacgggaatccttgggagaaaagccgtccggaattcatgcttcctgtccatttctacggtaaggtggagcacaccaacactgggaccaagtggattgatactcaagtggtgctcgcactgccttatgacactcctgtgccaggatacatgaacaacaccgtgaacaccatgcgtctttggtccgcccgggcacccaatgacttcaacctccgggatttcaatgtgggagactacattcaggcagtgttggatcgcaaccttgcagaaaacatttcccgggtgctgtaccctaatgataacttttttgaaggaaaagaactccgccttaagcaagagtatttcgtggtggcagcaacgctccaggacatcatacgaaggtttaaagcatcgaagtttggtagcactcgcggagctggaactgtgttcgatgcatttccagatcaggtggcaatccaattgaacgacacccacccggcacttgcgatcccagaactgatgagaattttcgtggatatagagaagttgccttggtcgaaggcatgggaattgacccaaaaaacttttgcgtacaccaatcatactgtgcttcctgaggcacttgagagatggcctgtcgacctggtggagaaactcctgccgagacatctcgagattatctatgagatcaaccaaaagcatctggatagaatcgtggctctgttcccaaaggatgtcgatcggctccggcgcatgtcactgattgaggaggaaggcagcaagcgaattaacatggcacatctgtgtattgttggatctcacgcagtgaatggggtcgcgaaaatacattcggatatcgtgaaaactaaggtgtttaaagacttctcagaactggaaccagataagtttcagaacaagacgaatggaatcactccacgcaggtggctgctgctctgtaatcctggccttgcagaactgatcgcagagaagattggagaagattacgtgaaagacctttcacagctcaccaaacttcactcatttcttggcgatgatgtctttcttagggaacttgccaaggtgaagcaggaaaacaagctcaagttttcccagtttctcgaaaccgagtataaggtgaagattaatccgtcctccatgttcgatgtgcaagtcaagcgcatacatgaatacaaaagacaactgcttaactgccttcacgtgataaccatgtacaatcggatcaagaaggaccccaagaagctctttgtgcctagaactgtcattattgggggtaaagccgcacctggctaccatatggccaagatgatcattaagctgatcacttcggtcgcggatgtggtgaataatgatcctatggtgggcagcaagctgaaagtgatcttccttgaaaactaccgcgtgtccctcgcagaaaaggtgattcctgcaaccgatctgtccgaacaaatatcaactgccggtactgaagcctcgggtaccgggaacatgaagtttatgctgaacggagcactgaccatcggtacgatggacggtgcgaacgtcgaaatggctgaagaggcaggagaagagaacctgtttatctttggaatgaggatcgacgatgtggccgcacttgacaaaaaggggtacgaagccaaggagtactacgaggcactccctgaactgaaactggtcattgatcagattgacaacggatttttctcgcctaaacagcctgatcttttcaaggacatcatcaacatgctgttttatcacgatcgattcaaggtctttgcagattatgaggcatacgtgaagtgccaggataaagtgtcacaactctacatgaaccctaaggcttggaatactatggtgcttaagaacattgcagcatccggtaaattctcgtccgatcgtactattaaggagtacgcacaaaacatctggaatgtggagccctcagatttgaagatatcgctttcgaatgagagcaacaaagttaatggaaac

SEQ ID NO: 250883 - DNA, 2541 bp, synthetic construct
  misc_feature 1..2541: note = Description of Artificial Sequence: Synthetic coding sequence
  source 1..2541: mol_type = other DNA
atggctaaaccactgaccgatcaggaaaagagaagacagattagtattcgaggaatcgtgggagtcgagaacgtcgccgagctcaagaagagctttaatcgccatctgcatttcaccctggtgaaggacaggaacgtggccacaacccgggactattattttgctctggcccacaccgtcagggatcaccttgtaggcagatggatacggacacagcaacactattatgataagtgtccaaagcgagtatattacctgtctttagaattctatatgggacggactctgcaaaataccatgattaaccttggcctgcagaatgcctgcgatgaggcaatataccagctgggtctggacatcgaagagctggaagaaattgaggaagacgctggtctggggaacggcgggctgggtcgattagccgcatgtttcctggactctatggctactctgggactagctgcttatggctacggcatcaggtacgaatacggcatttttaaccaaaagatcagggacggttggcaggtggaggaagctgacgattggctgagatacggcaacccttgggaaaaaagccggcctgaatttatgctgcctgtgcacttctacggaaaggtggagcacacaaatacaggaaccaagtggattgacacccaagtggtcctcgccctgccctacgacacccccgtgcccggctacatgaacaacacagtgaacaccatgcggctgtggtctgctcgcgccccaaacgattttaatttacgggacttcaatgtgggcgattacatacaggcagtcctggaccggaatctcgccgagaacatttctagagtgctatacccaaacgacaatttcttcgagggtaaggagctccgtctgaagcaagagtacttcgtggtggctgctacactccaagacatcatccgtcggttcaaggctagtaaattcgggagtacacgaggcgccggaaccgtgttcgacgcttttcctgaccaggtggctatccaactgaacgatacacatcctgctctcgccattccagagctgatgcgcattttcgtggacatagaaaagttaccatggtcaaaagcatgggagctgactcagaagacctttgcctataccaaccacaccgttctgccagaggccctggagcgatggcccgtagatctggtggaaaagttgctaccaagacacctcgaaataatatacgagatcaatcaaaagcacctagacagaattgttgccctcttcccgaaagacgtggaccggctgaggcgaatgtccctgattgaagaggaggggagtaagaggataaatatggctcatttatgtatagtgggatctcacgccgtcaatggcgtcgctaagattcatagcgatatcgttaaaaccaaagtgtttaaggatttctctgagctggaaccagacaagttccagaataaaaccaacggaatcacaccaaggcggtggttacttctatgcaaccctggcctcgcagagctaattgcagagaagattggagaggactatgtgaaggacctcagccagctgaccaagctacatagctttctgggggacgatgtgttcctgagagagcttgccaaagtgaagcaggagaacaagctgaaattctcacagttcctggagactgagtacaaggtcaagatcaatccatccagtatgttcgatgtacaggtcaagaggattcatgagtataagcggcaactgttgaactgcttacacgtgattaccatgtataacaggatcaaaaaagacccaaaaaagctgttcgtgcctcggaccgtgattataggaggcaaggccgcccctggctatcacatggccaagatgatcataaagctcatcacaagcgtggctgacgtcgttaataacgatccaatggtcggatcaaagttaaaggtgatctttctcgagaattatagggtgagcctggccgaaaaagtcatacccgctacagacctgtcagagcagatctccacagccgggactgaagccagtggtaccggaaatatgaagttcatgctgaacggagctctcactatcggcactatggatggtgcaaacgtggaaatggccgaagaagcaggggaagagaacttatttatatttggcatgcgaattgatgacgtcgccgcactggataaaaagggatacgaagctaaggaatattacgaggcactacctgagttaaagctggtcatagaccaaattgacaatggctttttcagtcccaaacagccagatttatttaaggacattatcaatatgctgttctaccacgacaggtttaaggttttcgccgactatgaagcctacgtaaagtgccaggataaggtatcccaactatatatgaaccctaaagcatggaacaccatggtcctaaaaaatatcgctgcatcaggtaagttctcctccgatcgcaccataaaggagtatgcccagaatatctggaacgtggagccaagcgacctgaagatctccctctccaacgagtcaaacaaggttaacggtaat

SEQ ID NO: 250884 - DNA, 2541 bp, synthetic construct
  misc_feature 1..2541: note = Description of Artificial Sequence: Synthetic coding sequence
  source 1..2541: mol_type = other DNA
atggctaagcccctgaccgaccaagagaaaagacgtcagatatctatccgggggatagttggagtcgaaaatgtggcagagctcaagaaatcgtttaacagacacctgcactttacgctggtgaaagatcggaacgtcgcaactactcgcgactactacttcgccctggcacataccgtgcgcgaccatctcgtgggtcggtggattcgaacccagcaacattactacgataaatgtccaaagcgcgtttactacctgtcactggagttttacatgggtaggacgctgcaaaacactatgattaatctgggcctgcaaaacgcttgcgatgaagcgatttaccaattgggcttggatatagaagaactggaagaaatcgaagaagatgcagggcttggtaatggtgggctggggagactggcagcatgtttcctggattccatggcgacgctcgggcttgcagcgtacggatacggcatccgttacgagtacggaatctttaatcagaagattagagacggttggcaagtcgaagaggccgatgattggcttagatacggaaatccatgggaaaagtcaaggccagagttcatgctcccagtgcatttctacggaaaggtcgagcacaccaacactggcactaagtggatcgacacgcaagtggtgttggcgctgccctacgatactccagtccccgggtacatgaacaacaccgtgaacaccatgagactgtggagcgcacgagcgcccaatgacttcaatcttagagactttaacgtgggtgattacatacaagcagtgctggatagaaacctcgcggaaaacatctcccgagtcctctaccccaacgataacttttttgaaggaaaggaactgcggttgaagcaggagtactttgtggtggcagccaccttgcaggacattatccgccgctttaaggcgtcgaagttcgggtctacccgaggagcaggtactgtgtttgacgccttcccagatcaggtggccattcaactgaacgacacccatccagcacttgcaatcccggaactcatgagaatctttgtcgacattgagaagttgccttggtcgaaggcatgggaattgacccaaaagacctttgcatacaccaaccatactgtccttcctgaagcactggaaagatggcctgtggatctggttgaaaagctccttccccggcatcttgagatcatttacgagataaaccagaaacatctggatcggattgtggccctttttcctaaagatgtggatcggctcagaagaatgtccctcatcgaagaagaaggatcaaagcgaattaacatggcccatctttgcattgtcggcagccacgcagtgaatggagtcgcaaagatacattcagacatcgtgaaaacgaaggtgtttaaggatttctcagagcttgagccagacaagttccaaaacaagaccaacggaattacgcccagacgatggctgctgctttgtaaccctggactcgcagaactcatcgcagagaagataggcgaagattacgtcaaagacctttcgcagctgactaagctccattcgtttcttggtgacgatgttttccttcgggaactggccaaggtgaagcaagaaaacaagctgaagttttcgcagtttctcgagactgagtacaaagtcaagatcaacccatcgtccatgtttgatgtccaagtgaaaaggattcatgagtacaagagacagcttctgaattgtctccatgtcattacgatgtacaatcgtattaagaaagatccaaagaagctgttcgtcccacgcaccgtgatcataggaggaaaggccgcacctgggtaccacatggcaaagatgatcatcaagctcataacttccgtcgcagatgttgtgaataacgatcctatggtgggcagcaaattgaaggtgatcttcctcgaaaactaccgggtgtcacttgcagaaaaggtgattccggctactgatctctcggagcagattagcactgcaggtacggaagcgagcggcaccggcaacatgaagtttatgctgaatggagcactgaccattgggacgatggacggagccaatgttgaaatggccgaagaagcaggtgaggagaacctgttcatattcggtatgagaatagatgatgtcgcagcgcttgacaaaaagggttatgaggcgaaggaatactacgaagctctgcctgaactgaaacttgtcatcgatcagatcgataatggtttctttagccctaagcaaccagacttgtttaaagacattatcaatatgctcttttaccatgaccgatttaaggtctttgcagactacgaggcgtacgtaaagtgtcaggacaaggtgtcacagttgtacatgaacccaaaagcatggaacactatggtgctgaaaaacattgcagcctcgggcaaattctcctcggacaggactattaaggagtacgcacagaatatctggaatgtcgaaccatcggacctcaaaatctccctgtccaacgagagcaataaggtgaatggtaat

SEQ ID NO: 250885 - DNA, 2541 bp, synthetic construct
  misc_feature 1..2541: note = Description of Artificial Sequence: Synthetic coding sequence
  source 1..2541: mol_type = other DNA
atggcaaagccattgacggaccaggaaaaaaggcgacaaataagcattagggggattgttggcgtggaaaatgtggcagagctgaagaagtccttcaatcggcatcttcactttactctggtgaaggatcgcaacgtggcaaccacgagagattactactttgcactggcacatactgtccgggaccatttggtggggagatggattcgaacccaacagcactactacgacaagtgccctaaaagggtctactatctctcgctggagttctatatgggaagaactcttcaaaacacgatgatcaacctggggctgcaaaacgcatgtgatgaggccatttaccagctcggactcgacattgaagaacttgaagaaatcgaggaagatgcagggctcggtaatggggggctgggaaggctggcagcctgctttcttgatagcatggcgaccctgggacttgcggcatacgggtacgggattcggtacgaatacgggatcttcaaccagaaaatccgtgacggatggcaggtggaagaagccgacgattggctccggtacggaaacccttgggagaagagcagacccgaattcatgctccctgtgcacttttacggaaaagtcgaacataccaacaccggaactaagtggattgatacccaggtggtgcttgctctcccctacgacactccagtgccaggttatatgaataacacggtgaacaccatgagactctggtcggcacgcgcaccaaatgatttcaacctgcgtgactttaacgtgggtgattacatccaggccgtgcttgaccgaaacctcgcagagaacatatcacgggtcctgtatccaaacgataacttttttgaaggtaaggaactccgactcaaacaagaatacttcgtggtcgcagcaacgctccaggatatcatccggagattcaaggcatcgaagtttggtagcactcgcggcgccggtactgtgtttgacgccttccctgatcaagtggctatacagctcaacgatacccatcccgcccttgcaatccccgaactcatgagaatctttgtcgatatcgaaaagctgccttggtcaaaggcgtgggagcttacgcagaaaaccttcgcctacacgaatcacaccgtgcttccagaagccttggaacgctggcctgtcgatctcgtggagaaactgctgccccggcatcttgagatcatctacgagattaatcaaaagcatctggacagaattgtggccctgtttcccaaagatgttgatcggcttcgacgcatgtctctgatcgaagaagaaggatcgaagaggattaacatggcacacctgtgtatcgtgggctcgcatgccgtgaacggcgtggctaagattcactcagatattgttaaaaccaaggtgtttaaagatttttcggaacttgagccagacaagtttcagaataagaccaatggcattactccaagacggtggctgcttctttgcaaccccggtctggccgaacttatagcggagaaaattggcgaagattacgtcaaggatcttagccaacttactaagctccactcttttcttggcgatgatgtgtttctgagggaacttgcaaaggtgaagcaagagaacaaacttaagttcagccagtttctcgaaactgagtacaaagtgaagattaacccgagctcgatgttcgacgtgcaagtgaaaagaattcatgagtacaaacgccaacttctgaactgcctccacgtgattactatgtacaacagaatcaaaaaggacccaaagaaactcttcgtgcctcggactgttatcataggaggtaaggccgcccctggataccatatggccaagatgatcatcaagttgattaccagcgtggcagatgtcgtgaacaacgatccgatggttgggtccaagctcaaggtgatcttcttggagaattaccgcgtctcgcttgcagagaaggtgattccagccaccgacctgtcagaacaaatttcgaccgctggcactgaagcgtccggcactggtaacatgaaattcatgctcaacggtgccctgaccatcggaactatggatggagcgaacgtcgaaatggcagaggaagcgggggaggagaatctgtttatctttggcatgcgtatagatgacgtcgctgcgctggataagaaaggttacgaagcaaaagaatactacgaggcactgccagagcttaagctggtgatagatcagattgataatgggttcttttcgcctaagcagcctgacctgtttaaagacataatcaacatgctcttttaccatgaccggtttaaagtgtttgccgattacgaagcctatgtgaagtgtcaagacaaagtgtcccaactgtacatgaatcccaaggcatggaatactatggtgcttaagaacattgcggcatcaggaaagttttcctcggaccgcacgattaaagagtacgctcagaacatttggaacgtggaaccaagcgatctgaagatttccctctcaaacgaatccaacaaggtcaacgggaat

SEQ ID NO: 250886 - DNA, 2541 bp, synthetic construct
  misc_feature 1..2541: note = Description of Artificial Sequence: Synthetic coding sequence
  source 1..2541: mol_type = other DNA
atggccaaacccctcacagatcaggaaaaaagacgacagatctctattcggggaatcgtcggagtagaaaatgtcgcggaactcaaaaaaagtttcaacagacatctgcatttcacacttgtgaaggatcgcaatgtggctactactagggattactattttgccctggcccacacagtccgggatcatctcgtgggacgctggatccgcacacagcagcactattacgacaaatgcccaaaacgggtgtattacctctccctcgagttttatatggggcgaacactccaaaatactatgattaatctagggttgcagaacgcctgcgatgaagcaatataccagctcggattagatatagaagaattggaagagattgaagaagacgctgggttgggaaacgggggactaggacgcctcgcagcatgcttcctcgattccatggcaacactcggattagccgcctacgggtatggaatacgatatgaatacggaatttttaatcagaagattcgtgatgggtggcaggttgaagaggctgatgattggctccgatacggaaatccatgggaaaaatctagaccagagtttatgctgcccgtacacttttatgggaaagtggaacacactaatacaggaactaaatggatcgatacacaagttgtgctcgcccttccatatgacacacccgtccccggatacatgaacaatacagtcaatacaatgcggctttggtctgcacgggcaccaaatgattttaacctcagggatttcaacgtgggagattatatacaagcagtcctcgatcgcaatctcgcagaaaatataagtcgggtcctttatcctaatgataactttttcgagggaaaagaactccgattgaagcaagaatatttcgtcgtcgcagccacattacaggatattattcgaagattcaaagcctctaaatttggatctacacgaggagccggaacagtattcgatgcgttcccagaccaggtagccatccagctgaatgatactcaccccgctctagcgatccccgaactgatgcggattttcgtcgatattgaaaagctcccatggtccaaagcttgggaactgacacagaaaacattcgcctatactaatcatacagttcttccagaagccctcgagaggtggcctgtggatctggtggaaaaactcctccctagacacctcgaaatcatatacgaaattaaccagaaacatctggatagaatcgttgcgttattcccaaaagatgtcgatagactgagacggatgtctctcatagaagaagaagggtctaaaagaataaatatggctcacctgtgcatcgtgggatcccacgctgtgaacggagtagccaaaatacattccgatatagtgaaaacaaaagtatttaaagatttttctgaattagagcccgataaattccagaacaaaactaacggaataactcctagacgatggctcctgctgtgcaaccccgggctggcagaattaatagccgaaaaaattggggaggattatgtaaaggatctctcacagttaacaaaacttcactctttcctgggggacgatgtattccttagagaactggccaaggtcaaacaggaaaataaactgaagttttctcagttcctcgaaacagaatataaagttaaaatcaacccttcatctatgtttgacgtgcaggtgaaacgaattcacgagtataaacgccagctgctgaactgcctccatgttataactatgtataatcgaatcaaaaaggatccaaagaaactatttgtccctagaactgtgatcattggagggaaagcagctccagggtaccacatggcaaagatgatcatcaaacttattacttctgtggcagatgtggttaataatgatccaatggtgggatctaaattaaaagtcatctttctagagaactatagggtctcgttagcagaaaaggtgatacctgctactgatctcagtgaacagataagtactgctgggacagaggcatccgggacagggaacatgaagttcatgcttaatggagcccttacaatcggaacaatggatggggcgaacgtggaaatggcagaagaagctggagaagaaaatctttttatatttgggatgagaatagacgacgttgctgccctggataaaaaaggatatgaagctaaggaatactacgaagcccttcctgaactcaaactggtgatcgatcagatcgataatgggttttttagtcccaaacagcccgacctgttcaaggacatcatcaacatgctgttttatcatgataggtttaaagtgttcgctgactacgaagcttatgtgaaatgtcaggataaagtgtctcagctgtacatgaaccccaaagcctggaatacaatggttctaaaaaatatcgccgcatctgggaagttctcctcagatagaacaatcaaagaatatgcccagaatatttggaacgtggaaccttccgacctcaagatctcactctccaatgaatctaacaaagttaatggaaac

SEQ ID NO: 250887 - DNA, 2541 bp, synthetic construct
  misc_feature 1..2541: note = Description of Artificial Sequence: Synthetic coding sequence
  source 1..2541: mol_type = other DNA
atggccaagccgctgaccgatcaggaaaagcgcagacagatttccatcagaggtattgtgggcgtcgaaaacgtggcagaactcaagaagtcgtttaacagacatctccatttcacgctcgtgaaggatcggaatgtggcaaccactagagactactactttgcacttgcacatacggtgagagatcacctggttggtaggtggattcgaactcaacaacattactacgacaagtgtccaaaacgcgtgtactatctctcacttgaattctacatgggcaggactctccagaacactatgattaaccttggactgcagaacgcatgcgacgaggcaatctaccagctggggctggacattgaagaactggaggagattgaagaagatgcggggctcggaaacggaggactggggagacttgccgcatgcttccttgattccatggcaaccctgggactcgcggcttacggatacggtatccgttacgaatacggtatctttaatcaaaagatccgcgatggctggcaagtcgaagaagcagacgactggcttagatacggaaatccatgggagaagtctaggccggagtttatgctgcctgtgcatttctacggaaaggttgaacacactaatactggaaccaagtggattgatacccaggtggtgcttgccctcccttacgatactccagtgccaggttacatgaacaatacggtgaacactatgagactgtggtccgcaagagctccaaacgatttcaaccttcgcgatttcaacgtcggagattacattcaggctgtccttgatagaaaccttgcagagaacattagccgagtgctgtacccgaacgacaatttcttcgaggggaaggaactgcgccttaaacaagaatactttgtggtagcggcaacccttcaagatatcatcagaagattcaaagcgagcaagtttggaagcacccggggagccggcactgtgtttgatgctttcccagatcaggtcgcaattcagcttaatgatacccatcctgcacttgcgattccagaacttatgcggattttcgtggacattgaaaagctgccttggtcgaaggcatgggagttgacccaaaagacttttgcctacactaaccataccgtcctgcctgaagcactggagcggtggccagtggatcttgtcgaaaagttgctgccaaggcacttggaaatcatttacgaaatcaaccaaaagcatcttgaccggattgtggcattgttcccaaaagatgtcgatagactgaggaggatgtctctcatagaggaggaaggaagcaaaagaattaacatggcccacctgtgcatcgtgggctcccatgcagtcaatggtgtcgccaagattcattcagatattgtgaaaactaaggttttcaaagatttttcggagctcgagccagataagtttcagaacaaaaccaacggaatcacccctcggaggtggctgctcctctgtaaccctggactggcggaactgatcgcggaaaagatcggcgaggattacgtcaaggatctttcacagcttaccaagctgcattcctttcttggagacgatgtgttcctgagagaactggcaaaagtgaagcaggagaataaacttaagttctcacagttcctggagactgaatacaaggtcaagataaacccttcgtcaatgttcgatgtccaagttaaacgcatccacgagtacaagagacagcttcttaactgtctgcacgtcattaccatgtacaaccgaatcaagaaggatcccaagaagctgtttgtgcctcgcaccgtgatcatcgggggaaaggcagcgccaggatatcacatggcaaagatgatcataaaactgatcacgagcgtggcagatgtcgtgaacaacgaccccatggtgggatccaaacttaaggtcatctttctggagaattaccgtgtgtcccttgcagaaaaagtgattcctgccacggacctttcagaacagatttccaccgcaggaaccgaagcatcaggtactggaaatatgaagtttatgcttaatggagccctgactatcggcaccatggatggtgcaaacgtggaaatggcggaggaagcaggggaagaaaacctgttcatttttggaatgcgcatcgatgatgttgcagcactggacaagaaaggttacgaagcaaaggaatactatgaagcactgcccgagctgaagctcgtgattgatcaaatagataacggctttttctccccgaaacagccagatctgttcaaagacatcatcaatatgcttttctaccatgatcgattcaaggtgtttgcagactacgaggcatacgtgaagtgccaggacaaggtgtcccagctgtacatgaatccaaaggcatggaatactatggtcctgaagaacattgcagctagcgggaagttttcgagcgacaggaccattaaagagtacgcacaaaacatatggaatgtcgaaccaagcgaccttaagatctcgctcagcaatgaatcgaacaaggttaacgggaac

SEQ ID NO: 250888 - DNA, 2541 bp, synthetic construct
  misc_feature 1..2541: note = Description of Artificial Sequence: Synthetic coding sequence
  source 1..2541: mol_type = other DNA
atggctaagccgctcaccgatcaagaaaaaaggagacaaatctcgattagagggatcgtcggagtggaaaatgtggcagagctcaagaaatcctttaaccggcaccttcatttcactctggtgaaggatcggaatgtcgcaaccactagagattactactttgctctcgcacacaccgtgcgtgatcaccttgtgggccgatggattagaactcagcagcactattacgataagtgtccaaagcgagtgtactacctttccctggagttttacatgggccggactttgcaaaataccatgatcaatcttgggcttcaaaacgcatgcgatgaagccatttaccagctgggactggacatcgaagaactggaggaaatcgaggaagatgcgggactgggtaacggcggccttggacgcctcgcagcgtgttttctggattcaatggcaacgctgggacttgcagcatacggctacggaatccgctacgaatacggaattttcaaccaaaagatccgcgatggctggcaggtcgaagaagccgatgattggttgcgctacgggaacccttgggagaagtcgcgcccggaattcatgcttcccgtgcacttttacggaaaggtcgaacatactaacactggtactaaatggatagatacccaggttgtgcttgcgctgccttacgatacgcctgtgccaggttacatgaacaataccgtcaacaccatgagactctggtcagcacgcgcgcctaacgactttaatctcagggatttcaatgttggagattacatacaggcagtgttggaccgcaatcttgcagagaatatctcccgggtgctttaccccaatgacaatttctttgaaggtaaggaactgagactcaaacaagagtactttgtggtggcagccacccttcaagacatcattagaaggtttaaggcatccaagtttggttcgaccagaggggcaggcaccgtgtttgatgcctttccagatcaagttgcgattcaactgaacgatactcaccccgccttggcgataccagaactgatgcgcattttcgtcgatattgaaaagctcccttggtcgaaggcatgggagctcacgcaaaagacctttgcatacaccaaccacaccgtgctgcccgaagcacttgaaagatggcctgtggaccttgtggaaaagctgctgccaagacatctcgagattatctacgagattaatcaaaagcatttggatcgaattgtggccctttttcctaaagatgtcgatcgtctgcgccgaatgtcgctgattgaagaagaaggcagcaagcgcatcaatatggcacatttgtgtattgtgggatcacacgcagtgaacggagtggcaaagatccattccgatatcgtgaaaaccaaggtgtttaaggatttttctgaattggaacctgataagtttcagaataagaccaatggaattactccacgaagatggctgcttctttgtaatccagggctcgcagaactgattgcagagaagatcggcgaggattacgtgaaggacctgagccagcttactaagctgcatagctttctcggggacgatgtgttcttgagagagcttgcaaaagtgaagcaggagaacaaactgaaattctcccaatttctggagacggaatacaaggtgaagatcaacccttccagcatgtttgatgtgcaggtgaagcggattcacgagtacaagcgacagctgctgaattgtttgcacgtcatcaccatgtacaacagaataaagaaagacccaaagaagttgttcgttccacgcaccgtgatcataggcggaaaggcagcaccaggttaccacatggcaaaaatgatcattaaacttattacctcggtggccgatgtcgtgaacaatgatcctatggtcggttcgaagctcaaggtgatttttctggagaattaccgggtcagcttggcagaaaaggtcatacctgcgaccgatctttccgaacagatctcgactgcaggaactgaggcgagcgggaccggtaatatgaagtttatgctgaatggagcgcttactattggtaccatggatggcgccaacgtcgaaatggctgaagaagcaggtgaagagaaccttttcatattcggcatgaggatcgacgatgtggcagcacttgacaaaaagggatacgaagcaaaagagtactacgaggccctcccagaactcaagctggtgatcgaccagatcgacaacggattctttagccctaagcaacctgatctgttcaaggacattatcaatatgctcttttaccatgacaggtttaaggtctttgcagattatgaagcatacgtcaagtgccaggacaaggtgtcgcagctgtacatgaacccaaaggcatggaatactatggtcttgaagaatatcgcagcgagcgggaagttttcgtccgatagaactatcaaggagtacgctcaaaacatttggaatgtcgaaccttcggacttgaaaatctcgctttctaacgagagcaacaaggtgaacgggaac

SEQ ID NO: 250889 - DNA, 2541 bp, synthetic construct
  misc_feature 1..2541: note = Description of Artificial Sequence: Synthetic coding sequence
  source 1..2541: mol_type = other DNA
atggcaaagccgctgactgatcaggagaagcgtcgacaaatcagtatccgcggcatcgtgggagtcgaaaacgttgcggaactcaagaaatcgtttaatagacacctgcacttcaccctcgtcaaagatcgcaatgtggcgaccacccgcgactactacttcgccctcgctcacaccgtgcgcgaccatttggtcggacggtggatcagaacccaacagcattactacgacaagtgtccaaagcgggtgtactacctgtcactggagttctacatgggacgcaccttgcagaataccatgatcaacctgggactgcagaacgcctgcgacgaggcgatctaccaacttggtttggatatcgaagaattggaagagatcgaagaagatgccggactcggaaatggaggcttgggaagactggccgcctgtttccttgattcaatggcgaccttgggactggcagcctacggctacggcatcagatacgagtacggaatcttcaaccagaaaattcgcgacggttggcaggtggaagaggctgacgattggctcagatacggtaacccgtgggagaagtcccggcccgagttcatgctcccagtgcacttctatggtaaggtcgaacacaccaacaccggcactaagtggatcgatactcaggtggtgctggcccttccttacgacaccccggtcccgggatacatgaacaacactgtcaacactatgagactctggtcagcgcgcgccccaaacgacttcaatctgcgcgactttaacgtgggagactacattcaagccgtgttggaccgcaatctggccgagaacatcagccgcgtcctctacccaaacgacaacttcttcgagggcaaggaactcagattgaagcaggaatacttcgtcgtggcagcaaccctgcaggacataattcgccgctttaaggcctcaaagttcgggtccacccgcggagcgggaactgtgttcgatgccttcccggaccaggtggccatacagctcaacgatactcatcccgcgctcgccattccagaactgatgcggatcttcgtggacatcgaaaagctgccgtggtcgaaggcctgggaactgacgcagaagaccttcgcatacaccaaccacaccgtgctgcctgaggcactggagaggtggccagtggacctcgtggaaaagctccttccgcggcatctggaaattatctacgaaatcaaccaaaagcacctcgatcggatcgtagcgcttttcccgaaggatgtggatcggctgcgcagaatgtctctgattgaggaggagggaagcaaacggatcaatatggcacatctctgcattgtaggatcgcatgctgtgaacggtgtggctaagatccattcagatatcgtcaaaactaaggtgtttaaggacttctcagagctggaacctgataagtttcagaataaaactaacggtatcactccgcgccggtggctcctgctgtgcaacccaggcctggctgaattgatagctgaaaaaatcggagaggactacgtgaaagacctgagccaactgacgaaacttcatagctttctcggcgacgatgtcttcttgagggaactcgcaaaggtgaagcaggagaacaagctgaaattctctcagttcctcgagactgagtacaaggtgaaaatcaacccgtcctcaatgttcgatgtgcaggtgaaacggattcacgagtacaaacggcaactgctgaactgcctgcacgtgatcaccatgtacaacagaatcaagaaggatccaaagaagctcttcgtgccgcgcaccgtgatcattggtggaaaggcagcccctggctaccatatggccaaaatgattatcaagttgatcacgagcgttgctgatgtggtgaacaacgacccgatggttgggagcaaactcaaggtgatcttcctcgagaactatcgggtgtcgctggctgagaaagttatccccgcgactgatctctcggaacagatctccactgcgggaactgaggcatccggcactggaaacatgaagtttatgcttaatggcgccttgaccatcgggactatggacggtgcaaatgtcgagatggccgaagaggcgggcgaagagaacttgttcattttcggtatgcgcatcgatgatgttgccgcactggacaagaagggatacgaggccaaagagtactacgaagcgctgccagagctcaaattggtcatcgatcagatcgacaacggattcttttcgccgaagcagcccgacctctttaaggacatcatcaatatgctgttttaccacgaccggtttaaggtgttcgctgactacgaagcgtacgttaagtgccaagacaaggtcagtcaactgtacatgaacccgaaggcttggaacaccatggtgctgaaaaacatcgcggcttcaggcaaattctcgtccgatcgcactatcaaggaatacgcacaaaacatctggaacgtcgaaccatccgacctgaagatttccttgtccaacgagtccaataaagtgaacggaaat

SEQ ID NO: 250890 - DNA, 2541 bp, synthetic construct
  misc_feature 1..2541: note = Description of Artificial Sequence: Synthetic coding sequence
  source 1..2541: mol_type = other DNA
atggctaaaccgcttacagatcaggaaaaaagacgccagatatctatccggggtatcgtcggggtggaaaacgtcgcggaactaaagaaaagcttcaaccgacatctgcacttcactttggtcaaagatcgcaacgtggctacaaccagggactactacttcgcgctggctcacaccgttcgtgatcatctggttgggagatggatccgcacccagcagcattattacgataagtgtccaaagcgcgtgtactacttaagcctggagttttatatgggccgcactctgcagaataccatgataaatctaggcctccagaatgcttgtgatgaagcgatctatcagcttggtcttgacatcgaagagcttgaagagatcgaagaggatgccggcttggggaatggcggactcggtaggctggctgcttgctttcttgatagtatggccacactaggactcgcagcatatgggtatggaatacgatatgagtacggaatcttcaaccaaaagatcagagacgggtggcaggtcgaggaggcggacgattggctgcggtacggcaacccctgggagaagtctcgccccgaattcatgttacctgtacacttctatggtaaagttgagcacaccaatacaggtacgaaatggatcgatacacaggttgtattggcgctcccatacgacaccccggtaccgggatatatgaacaataccgttaataccatgcgcttatggtcagcccgtgccccaaatgactttaatcttagggatttcaatgtgggagactatatccaggctgtgctagatcgcaacctggccgagaatatctctcgggtcctttaccctaatgacaatttcttcgaaggaaaggagcttaggttaaagcaggagtactttgtggtagccgccacactccaggatatcatccgccgattcaaggctagtaaattcggctcgacacgcggagctggtaccgtcttcgacgcctttccagaccaagtcgcgatccagctgaatgacacccatccagcactcgccataccggaattaatgcggatctttgttgacatcgaaaaactcccctggtctaaagcgtgggagcttacacagaaaacgttcgcgtacacaaaccatacagtcctccccgaggctctggaacgctggccggttgaccttgtggagaaactcctccctcgtcacttggagattatctatgagatcaaccagaagcacctcgaccgtattgtggccctcttcccgaaagacgttgaccgattgcgaaggatgagcttgatcgaggaggaagggtcgaagcggatcaacatggctcatctatgcattgtgggatcgcatgctgttaacggcgttgccaaaattcactctgacattgtcaagactaaagtctttaaggatttctctgagctagagccagacaaatttcagaacaaaaccaacggcatcaccccacggcgctggttgctactctgcaaccctggacttgctgagctcatcgcagaaaaaatcggggaagattacgtcaaagatctgagtcaactaaccaagctacattccttcctaggcgatgacgttttcctccgcgagctggccaaggtgaagcaggagaacaagctgaaattttcacagtttttggagacggagtataaggtcaaaattaatcccagcagtatgttcgatgtgcaggttaagcggatccacgagtacaagagacagctgctgaattgcctccacgtaataaccatgtacaatagaattaagaaggaccccaaaaaattgtttgttccacgcaccgtaattattggaggaaaagcagcacctggttatcatatggctaaaatgatcatcaaattaattacgagcgtggctgacgtcgtgaataacgacccgatggttggtagtaagctgaaggtgatctttctggaaaactaccgcgtgagcttagcagaaaaggtcatccctgccactgacctcagtgagcagatctccaccgccggtactgaggcctctggtaccggaaacatgaagttcatgttgaacggggccctaacaatcggaactatggacggtgcgaatgtagagatggctgaggaggctggtgaagagaacctatttatcttcgggatgcgaattgacgacgttgccgctttggataaaaagggttatgaagctaaagagtattatgaggcgctaccagaactcaagcttgtcatcgaccagatcgataacggattcttttctcccaagcagcctgacttattcaaggatatcattaatatgctgttctatcatgatcgcttcaaggtcttcgccgattatgaagcctatgtcaagtgtcaggacaaggtctcccagctttacatgaatcccaaggcatggaatactatggttctcaagaacatcgccgcctccggtaaattctcttccgataggacaatcaaggagtacgcccagaatatttggaacgtcgagccgagcgatctgaagatctctctgagtaacgagtcgaataaagtaaatggaaat

SEQ ID NO: 250891 - DNA, 2541 bp, synthetic construct
  misc_feature 1..2541: note = Description of Artificial Sequence: Synthetic coding sequence
  source 1..2541: mol_type = other DNA
atggctaagccactgaccgatcaagaaaagagacgccagatcagcatcagaggtatcgtgggtgttgaaaacgtcgcagagcttaagaagagctttaatcgccatctccatttcactcttgtcaaggatagaaacgtcgctactactagagattattacttcgcactggcccatacggttagggatcatctggtgggccgctggatacgcacacagcagcattattacgacaagtgccccaagcgcgtatactacctgagtctcgagttctacatgggtaggacgctgcaaaacactatgataaaccttggtttgcaaaatgcctgtgacgaagcgatctaccagctgggtttggatatcgaggagctcgaggaaatagaggaagatgctggcctcggaaacggtggtttgggacgcctcgcagcttgcttcctcgattctatggccacgctcggtttggccgcttacggctacggcatcagatacgagtacggaatattcaaccagaagattcgcgacggatggcaggtagaggaggccgatgattggttgagatatggcaacccctgggaaaaaagtcgccctgagtttatgctgccggtgcacttctacggcaaggtcgagcatactaatacgggaactaagtggatcgacacccaggtggtcctggcattgccatacgacacccccgttccaggctatatgaacaacactgtcaacaccatgagactgtggtccgcgcgcgcccccaacgactttaatttgagagatttcaatgtgggtgactatatccaggccgtgctggaccgcaacctggctgaaaatatctccagagtgctgtaccccaacgacaacttctttgaaggcaaggaattgaggcttaaacaggagtacttcgtggtcgcggcgacactgcaggatattattagaaggttcaaggcgagcaagtttggtagcacccgcggcgcaggaacagtgttcgacgccttcccagaccaagtggctatccagctgaacgacacacaccctgcattggccatccctgagctgatgaggatctttgtcgacatcgagaaactgccgtggtccaaggcctgggaacttacgcaaaagaccttcgcttatacgaaccacacggtcctgccagaagcgcttgaacgctggcctgtggacttggtcgaaaagctgctgccccgccatcttgaaatcatctatgaaataaaccagaaacacctggatcgcatagtggctttgttccccaaggacgtggacagactgcgccgcatgtctctgatcgaagaagagggtagtaagagaatcaatatggcccacctctgcatagtaggcagccatgctgtgaacggtgtcgccaagatccactcagatatagtaaagactaaggtgttcaaagacttttccgaactggagccagacaagttccaaaataagacaaacggaattacaccacgcaggtggctgctgctttgtaatcctggccttgcagagcttatcgcagagaagattggagaggattacgtgaaggacctctctcagctgacgaagcttcactctttcttgggagacgatgtcttcctccgcgagttggcaaaggttaaacaagaaaacaagctgaagttctcacagtttctcgaaactgagtataaggtgaagatcaatccttcatcaatgtttgacgtccaggttaagcgcatccacgagtataagcgccagttgctgaactgcttgcatgtgatcacaatgtacaaccgcatcaaaaaagatcctaagaaattgtttgtgcccaggaccgttatcatcggaggtaaagcggcgcctggctaccatatggcgaagatgattattaagctgatcacgagcgtcgccgatgtcgtaaacaacgaccctatggttggatccaagctcaaagtcatcttccttgaaaactatagagtcagtctggcagagaaggtcatccctgctaccgatctgtcagagcagatttcaactgctggtactgaagcaagtggcacaggcaatatgaaattcatgctgaacggcgctctcactatcggaactatggatggagcaaacgtcgaaatggccgaggaggctggagaagagaacctgttcatctttggaatgcgcatagatgatgtcgccgccctggacaaaaagggttacgaggcaaaggagtattatgaggcactgcctgagcttaagttggtgattgaccaaatagacaacggtttcttctctcctaagcagcctgacctttttaaagacatcatcaatatgttgttctatcacgacagattcaaggtcttcgcagactacgaggcctatgtgaagtgccaggacaaggtcagccagctgtatatgaatccgaaggcctggaacacaatggtcctgaagaacattgccgcctccggtaaattttctagcgaccgcactatcaaggaatacgctcagaacatttggaacgtagaacctagcgacctgaagatcagcctgtcaaacgaatccaacaaagtgaatggcaac

SEQ ID NO: 250892 - DNA, 2541 bp, synthetic construct
  misc_feature 1..2541: note = Description of Artificial Sequence: Synthetic coding sequence
  source 1..2541: mol_type = other DNA
atggctaagccactgactgatcaggagaagcgccgccaaatatccattcgcggcatcgtcggggtggagaacgtagctgagctgaagaagtcttttaaccgacacctgcattttaccctcgttaaagaccgcaacgtagccactacccgtgactattactttgcgctggcacatactgtgcgggaccatcttgttggacggtggattcggacccaacagcactactacgataagtgccctaagcgggtctattatctgtctctggaattctatatgggtcgcacactccagaataccatgatcaatctcggactgcagaatgcctgcgatgaagctatctatcagctggggctggatattgaggagttggaggaaattgaagaggatgctggcctggggaatggcggcctgggccgcctcgccgcatgcttcctcgactccatggcgacattgggactcgctgcctatgggtatggcatccgctatgagtacggaattttcaatcagaagatccgcgatggctggcaggtggaagaggcagacgactggttaaggtatggcaacccgtgggaaaaatccagacctgaatttatgctgcctgtccacttctacggtaaggtcgaacataccaataccggtaccaagtggatcgacacacaggtggtccttgcattaccgtacgatacacctgtaccagggtatatgaataacaccgtgaacaccatgcgcttatggtccgcgcgagcccccaatgacttcaacttgcgcgatttcaatgtcggggattacattcaggctgtgctggatagaaatctggccgaaaacatctccagggttctgtatccgaatgacaatttcttcgagggcaaagaactgcggctgaaacaggagtacttcgtggtggcagctaccctgcaagacattatacgccgtttcaaggcctctaaattcggatctaccagaggggccggcacagtctttgacgcgtttccagatcaggtggcaatccagttaaatgatacacatcccgctctggccataccggagctaatgcggattttcgttgatatcgaaaaactgccttggtccaaggcctgggaactgactcagaagaccttcgcatacactaaccacacggtgctgcccgaggcattagagcggtggcctgtagatctggtagagaaactgcttccgcggcatctggaaataatctacgagatcaaccagaagcatttggacaggatcgtggcactgttcccaaaggatgtggatcgcctgcgtcggatgtccctcatcgaggaggagggatctaagcgcatcaacatggcccatctatgcattgtgggttcccacgctgtgaacggggtagccaaaatccatagcgacatcgtgaagacgaaggtattcaaggatttttctgagctggagccagacaaatttcaaaacaaaaccaatggtattacgccaagacggtggctattgctgtgtaatccaggtctggccgagctcattgctgagaagatcggcgaagactacgtaaaggatctgagtcagcttaccaagcttcactctttcctcggggatgatgtctttttgcgggagctggctaaagtgaagcaagagaataaactcaagttctctcagttcctggagactgagtacaaggtgaagattaacccctcctccatgtttgatgttcaggtcaagcgaatacacgaatacaaacggcagcttttgaactgcctgcatgtcattactatgtacaaccgcatcaaaaaagaccctaaaaagctgttcgtccctagaactgtaatcatcggcggcaaggctgcacccgggtaccacatggctaagatgataatcaaacttattacctctgtagctgatgttgttaacaatgatcctatggttgggtcaaagctaaaagtgattttcctcgagaattatagagtgtctctggccgagaaggtgatccccgccacggatctgtcagagcaaatctctactgccggcaccgaggcaagtggtaccggtaatatgaaattcatgctgaatggagctcttaccatcggcacaatggatggcgccaacgtggaaatggctgaagaggccggagaagagaatctgtttatttttggcatgcgcatagacgatgttgcagcattggataaaaaaggctacgaagctaaagaatactatgaggcgctacccgagctgaagctcgtgatcgatcagatcgacaacggcttcttttcacctaagcaacctgatctgtttaaggacatcatcaacatgctattctaccacgatcgtttcaaggtgttcgccgactatgaagcttatgtgaaatgtcaggacaaagtctcgcagctgtacatgaaccctaaagcctggaacactatggtgctgaaaaatatagcagccagtggcaaattctcaagcgatagaactattaaagaatatgcacagaacatttggaatgttgagccttccgacttgaagatcagcctgtcaaatgagtccaacaaagtgaatggtaat

SEQ ID NO: 250893 - DNA, 2541 bp, synthetic construct
  misc_feature 1..2541: note = Description of Artificial Sequence: Synthetic coding sequence
  source 1..2541: mol_type = other DNA
atggcgaaaccgttaacggatcaagaaaaacgtcgtcaaatatcgatacgtggtatagtaggtgttgaaaatgtagcggaactaaaaaaatcgtttaatcgtcatctacattttacgctagtaaaagatcgaaatgttgcgacgacgcgtgattattattttgcgttagcgcatacggtacgagatcatctagtaggtcgatggatacgtacgcaacaacattattatgataaatgtccgaaacgtgtatattatctatcgctagaattttatatgggtcgtacgctacaaaatacgatgataaatttaggtttacaaaatgcgtgtgatgaagcgatatatcaattaggtctagatatagaagaactagaagaaatagaagaagatgcgggtctaggtaatggtggtctaggtcgtctagcggcgtgttttttagattcgatggcgacgctaggtctagcggcgtatggttatggtatacgttatgaatatggtatatttaatcaaaaaatacgtgatggttggcaagtagaagaagcggatgattggttacgttatggtaatccgtgggaaaaatcgcgtccggaatttatgttaccggtacatttttatggtaaagtagaacatacgaatacgggtacgaaatggatagatacgcaagtagtactagcgttaccgtatgatacgccggtaccgggttatatgaataatacggtaaatacgatgcgtttatggtcggcgcgtgcgccgaatgattttaatctacgtgattttaatgtaggtgattatatacaagcggtactagatcgaaatttagcggaaaatatatcgcgtgtattatatccgaatgataatttttttgaaggtaaagaactacgtctaaaacaagaatattttgttgtagcggcgacgctacaagatataatacgtcgttttaaagcgtcgaaatttggttcgacgcgaggtgcgggtacggtttttgatgcgtttccggatcaagtagcgatacaactaaatgatacgcatccggcgttagcgataccggaactaatgcgaatatttgtagatatagaaaaactaccgtggtcgaaagcgtgggaattaacgcaaaaaacgtttgcgtatacgaatcatacggttctaccggaagcgttagaacgatggccggttgatttagtagaaaaattattaccgcgtcatttagaaataatatatgaaataaatcaaaaacatttagatcgaatagttgcgctatttccgaaagatgtagatcgtctacgtcgtatgtcgctaatagaagaagaaggttcgaaacgtataaatatggcgcatttatgtatagttggttcgcatgcggtaaatggtgtagcgaaaatacattcggatatagtaaaaacgaaagtttttaaagatttttcggaactagaaccggataaatttcaaaataaaacgaatggtataacgccgcgacgttggttattattatgtaatccgggtctagcggaattaatagcggaaaaaataggtgaagattatgttaaagatttatcgcaattaacgaaactacattcgtttctaggtgatgatgtatttctacgtgaattagcgaaagttaaacaagaaaataaactaaaattttcgcaatttttagaaacggaatataaagttaaaataaatccgtcgtcgatgtttgatgttcaagttaaacgaatacatgaatataaacgacaactactaaattgtttacatgtaataacgatgtataatcgaataaaaaaagatccgaaaaaactatttgtaccgcgtacggtaataataggtggtaaagcggcgccgggttatcatatggcgaaaatgataataaaattaataacgtcggtagcggatgtagttaataatgatccgatggttggttcgaaactaaaagtaatatttctagaaaattatcgagtttcgctagcggaaaaagtaataccggcgacggatctatcggaacaaatatcgacggcgggtacggaagcgtcgggtacgggtaatatgaaatttatgttaaatggtgcgctaacgataggtacgatggatggtgcgaatgttgaaatggcggaagaagcgggtgaagaaaatttatttatatttggtatgcgaatagatgatgtagcggcgctagataaaaaaggttatgaagcgaaagaatattatgaagcgttaccggaattaaaattagtaatagatcaaatagataatggttttttttcgccgaaacaaccggatttatttaaagatataataaatatgctattttatcatgatcgatttaaagtatttgcggattatgaagcgtatgttaaatgtcaagataaagtttcgcaactatatatgaatccgaaagcgtggaatacgatggttctaaaaaatatagcggcgtcgggtaaattttcgtcggatcgtacgataaaagaatatgcgcaaaatatatggaatgtagaaccgtcggatttaaaaatatcgctatcgaatgaatcgaataaagtaaatggtaat

SEQ ID NO: 250894 - DNA, 2541 bp, synthetic construct
  misc_feature 1..2541: note = Description of Artificial Sequence: Synthetic coding sequence
  source 1..2541: mol_type = other DNA
atggcaaagcccctgaccgaccaggaaaagaggcgacagatcagcattagaggaattgtcggagtggagaacgtggcagagctgaagaagtcgttcaacaggcacctgcatttcacccttgttaaagaccgcaacgtcgccaccacccgcgattactatttcgcactcgcacatactgtgagggatcatctggtcggccggtggattagaactcaacagcactattacgacaaatgtccaaagcgcgtctactaccttagcctcgaattctacatggggcgtacgctgcagaacacgatgattaatcttggacttcaaaacgcatgtgatgaagcaatttaccagctgggactggacatcgaagaactggaggagattgaagaggacgccggactgggtaatggcggacttggaaggttggccgcatgttttctggattcgatggcgacgctcggacttgcggcatacggttatggaatccggtacgagtacggaatctttaatcagaaaatccgagacggctggcaggtcgaagaggctgacgattggctgcgctacggaaacccatgggagaaaagcagaccagaattcatgctgccagtgcatttctacggaaaggtggagcataccaacactggcaccaagtggatcgatacccaagtggtgctcgcgctcccatatgacactccagtgcccggttacatgaacaatactgtgaacacgatgcggctttggtcggcacgggcaccaaatgatttcaacttgcgggacttcaatgtcggggattacatccaagcagttcttgatcggaacctggcagaaaacattagcagagtgctttacccgaacgataacttttttgaaggtaaggaactgagacttaagcaggagtactttgttgtggcagcaactctgcaagacataatccgtcggtttaaggcctcgaaatttggctcaaccagaggggcaggcaccgtctttgacgccttccctgaccaagtcgcaatccagctcaacgatacccatccagcacttgccataccagaactgatgagaatctttgtggatattgagaagctcccatggtccaaggcttgggaacttacgcaaaaaacgtttgcctacactaaccatactgtgctgcctgaggcattggaaaggtggccggtagatctggtggagaagctgttgccccggcatctcgagatcatttacgagattaaccaaaagcacctggacaggattgtggcacttttccctaaggacgtggatcgcctgagaagaatgagcctgatagaggaagaaggttccaagcgcattaacatggcacacctgtgtatcgtgggaagccatgcagtcaatggagtggctaagattcattcggatattgttaagaccaaggtctttaaggatttcagcgaactggaaccagataagtttcaaaacaagactaacggaatcactcctagacgatggctcctcctctgtaaccctggcctcgcagagttgattgcagagaaaattggggaggactacgtgaaagacctgtcgcagctcacgaagctccactcgtttcttggggatgacgtgtttcttagagaacttgccaaggtcaagcaagagaataaactcaagttctcacaatttcttgaaaccgaatacaaggtgaagattaaccccagctccatgtttgatgtgcaggtgaagaggattcatgagtacaagaggcaactcttgaactgcctccatgtcataaccatgtacaaccgcataaagaaggatcccaagaagctgtttgtgcctcggaccgtgattatcggaggaaaggcggcacctggttaccacatggcaaaaatgatcataaaactgatcacttccgtggcagatgtcgtgaacaacgacccgatggtggggagcaaacttaaagtgatctttctggagaattaccgggtgtccctcgcagaaaaggtcatccccgcaactgatctgtccgagcagatatccactgcagggactgaagcgtcgggtaccggcaacatgaaattcatgctcaatggcgcacttaccattggaactatggatggcgctaatgtcgagatggccgaggaagcaggtgaagaaaacctgtttatctttggtatgcggatcgatgacgtggctgcgcttgataagaaggggtacgaggcaaaggagtattacgaggcactgccagagctcaagttggtcattgaccaaattgataatggtttcttctcccctaagcagccagaccttttcaaggatatcattaacatgcttttctaccatgatcgcttcaaggtgtttgctgattacgaagcgtacgtgaagtgtcaagacaaggtgtctcagctctatatgaatcctaaggcctggaatactatggtgctgaaaaacatcgcagcatccggaaaattctccagcgatcgaaccataaaggagtacgcacaaaacatctggaacgtggaacccagcgacctgaagatttccctctcgaacgagtctaacaaagtcaacggcaac

SEQ ID NO: 250895 - DNA, 2541 bp, synthetic construct
  misc_feature 1..2541: note = Description of Artificial Sequence: Synthetic coding sequence
  source 1..2541: mol_type = other DNA
atggcaaaaccacttactgatcaagagaaacgcagacaaatttcgattcgggggatcgtgggcgtggagaatgtcgcagagctcaagaagtcgttcaatcgccacctccattttactctggtgaaggatcgcaacgtggccacgaccagagactattacttcgcactcgcacacactgtccgcgaccatctcgtcggaagatggatccgaacccaacaacactactacgataagtgtccgaaacgggtgtactaccttagcctggagttctacatgggacgcactctccagaataccatgattaaccttggcctgcagaacgcctgcgatgaagctatctaccaactcggacttgacatcgaggagttggaagagattgaggaggacgccggacttggtaacggtggcttgggacgactggccgcatgtttcctcgatagcatggcaaccttggggctcgctgcatacggctacgggattaggtacgagtacggaatcttcaatcagaaaatccgcgatggttggcaggtcgaagaagctgatgattggcttcgctacggcaacccgtgggagaagtccaggcctgagtttatgctgcccgtgcacttttacggaaaggtggaacacacgaacaccggtactaagtggatcgatacccaggtcgtccttgcacttccttacgatacccctgtgcctggttacatgaacaatactgtgaacacgatgcgtctttggtccgctagagcacctaacgatttcaacctgcgagacttcaatgtcggggactacatccaagctgtcctcgatagaaatctggcagaaaacatttcacgggtgctttacccaaacgataacttcttcgagggaaaggaactgagacttaagcaagaatacttcgtggtggcagccaccttgcaggacattatcaggcgtttcaaagcgagcaagttcggtagcaccagaggagcaggcactgtctttgacgcattccctgaccaagttgcaatccagcttaacgacactcatcccgccctggcgatcccagaacttatgcgcatttttgtggatattgagaagttgccctggagcaaagcatgggaactcacccaaaagacctttgcatatactaaccataccgtccttccagaggccttggaacgttggcctgtggatctggtggaaaagctccttccgaggcacttggagattatctacgagatcaaccagaaacacctggaccgcattgtcgcactgtttcctaaagacgtggatagactgcgccgaatgtcgctcattgaagaggaaggttcgaaacgtattaacatggctcacctgtgtattgtcggatcgcatgccgtgaatggagtggccaagatccattcggatattgtcaagaccaaggtgttcaaagattttagcgaactggaaccagataagtttcagaataagaccaatggcattacgccgagacgttggcttcttctgtgtaaccctgggctggcagaactgattgccgaaaagataggagaggattacgtcaaagatctgtcccaattgaccaaactgcatagctttctgggagatgatgtctttcttcgcgaactggctaaggtcaagcaagaaaacaaacttaagttcagccaatttcttgaaacggagtacaaggtcaagatcaatccttcatcgatgttcgacgtgcaggttaaaagaattcatgaatacaaacgacaactgctgaactgtctgcatgtgatcacgatgtacaatagaatcaaaaaggatcctaaaaagctgttcgtcccccggaccgtcataataggcggcaaagcagcaccaggataccacatggcaaagatgatcatcaagctgatcacttcagtggcagatgtggtgaataacgacccgatggtgggatccaagctgaaggtcatctttctggaaaactatcgcgtgtcacttgcagaaaaggtaatcccagcaaccgacttgtccgagcagattagcaccgcaggtaccgaggcatccggaactggcaacatgaagtttatgctgaacggagctctgaccattgggaccatggacggtgcgaacgtggagatggcagaagaggcaggtgaggaaaacctctttatcttcggcatgcggatcgatgacgtcgcagcactcgataagaaaggctatgaggcgaaagagtactacgaggcactgcctgaactcaagctggtcatcgatcaaatagataacggcttcttttctcccaagcagcctgatctgtttaaggacatcattaacatgcttttctaccatgatagatttaaggtgttcgcagattacgaagcgtacgtgaagtgtcaagacaaagtctcgcagctttacatgaatccaaaggcctggaacactatggtgctcaagaatatcgcggcgtctggcaagtttagctcggaccgaactattaaggaatacgcacaaaacatttggaacgtggaaccatccgatttgaagatatcgctttctaacgaatcaaacaaggtcaacggcaat

SEQ ID NO: 250896 - DNA, 2541 bp, synthetic construct
  misc_feature 1..2541: note = Description of Artificial Sequence: Synthetic coding sequence
  source 1..2541: mol_type = other DNA
atggccaaacctcttactgatcaagagaagaggcgacaaattagcatccgcggtatcgtgggtgtcgagaatgtggcagagctcaagaagtccttcaaccgtcaccttcattttacgctggtgaaagaccggaatgtcgcaactacccgggattactactttgcattggcccataccgtcagagatcatcttgtcggtaggtggatccgcactcaacaacactactacgataagtgcccaaagcgagtgtactacctgtcacttgagttttacatgggccgcaccctgcaaaacaccatgataaacctggggcttcagaatgcctgtgatgaagcaatctatcagcttggtctggatatcgaggaactcgaagagattgaagaagatgccggtctgggcaacggtggacttgggcggctcgcagcgtgttttcttgattcgatggccacgctgggcctggccgcgtacggttacgggatccgttacgagtacggcatattcaaccagaaaattcgggacggatggcaggtggaagaggccgatgattggctgcgctatggtaacccttgggaaaagagccggcctgagtttatgcttccggtgcacttttacggaaaggtggaacacactaacactggaactaagtggatagatacgcaagtggtgcttgctttgccatacgatactccggtgccaggatacatgaacaataccgttaatactatgcgtctgtggagcgcacgcgcgccaaacgacttcaatctgcgtgatttcaacgtgggggattacatccaggcagtccttgaccgaaatctggcagagaacatctccagagtgctgtacccaaatgataacttcttcgagggaaaagaacttagactcaagcaggaatactttgtggtggcagcgacgctgcaagacattattcgtcgctttaaggcatccaagttcggttccaccagaggggccggaaccgtttttgatgcgtttccagaccaagtggcgatccagctgaatgatacccatccggcattggcaattcctgaactgatgagaatctttgtggacatcgaaaaactcccttggtccaaagcatgggaacttacccaaaagacttttgcatacactaatcacaccgtcctgccggaagcccttgagagatggcccgtggatctggtcgaaaagctgcttccgaggcatctggagataatctacgaaatcaaccaaaagcatctcgacaggatcgtggccctgtttcccaaggatgttgacaggttgcgaagaatgtcgctcattgaagaggaaggatcgaaaagaattaacatggctcatctctgtattgtgggatcccatgcggtgaatggggtggcaaaaatccactcggacattgtcaaaaccaaagtctttaaggatttttccgaactcgaacccgataagtttcagaacaagactaatgggataactcccaggcgctggctgctgttgtgtaatccaggcctcgctgagcttatcgccgagaaaataggtgaggactacgttaaggatctgtcccaattgaccaagctccactcgttcctgggagatgacgtctttctccgcgagctcgcaaaggtgaagcaggaaaacaagttgaagtttagccaattccttgaaactgaatacaaagtcaagatcaatccatcgtccatgtttgatgtgcaggtgaagcggattcacgaatacaagagacagctcctgaactgccttcatgtgatcacgatgtacaatcgcatcaaaaaggatcctaaaaagctgttcgtccctagaactgtgataattggaggaaaagccgcaccaggctaccacatggcaaagatgatcattaagctcatcacttcggtggcagatgtggtcaataacgaccctatggtgggaagcaaacttaaagtcatttttcttgaaaactaccgggtgagcctggcagaaaaagtgatccctgcaaccgatctttcggaacaaatctcaactgcaggtactgaggcatcgggtactgggaatatgaagtttatgctgaacggagcacttaccattggaactatggatggtgccaatgtggaaatggctgaagaagcaggtgaagaaaacctcttcatttttggaatgagaatagatgatgtggccgcccttgataagaagggatacgaagcgaaggaatactacgaggcacttccagagctcaagctggtgatcgatcaaatcgataacggattctttagcccgaaacagccagatctgtttaaggacattatcaacatgcttttctaccatgatcggttcaaggtgtttgccgattacgaagcctacgtcaagtgccaggataaggtcagccagctttacatgaatccaaaagcatggaacactatggtgctgaagaacatcgcggcatccggcaaattctcgtcggatcgcactataaaggagtacgcacagaacatctggaacgttgaaccaagcgacttgaagatttcgctgtcgaacgagtccaacaaggtgaacggtaat

SEQ ID NO: 250897 - DNA, 2430 bp, synthetic construct
  misc_feature 1..2430: note = Description of Artificial Sequence: Synthetic coding sequence
  source 1..2430: mol_type = other DNA
atggagcacaaggaagtggtgttgttgctccttctgtttctgaagtccggccagggcgaacctctcgatgactacgtgaacacccaaggagcgtcgctgttttcggtgacgaagaaacaactgggtgcaggctcaattgaagaatgtgccgcaaaatgtgaagaggatgaagaatttacttgtagagcctttcaataccattccaaggagcagcagtgtgtgattatggcggagaacagaaagtcgtcgatcataattcgcatgagagacgtcgtcttgttcgagaaaaaggtgtacctgagcgaatgtaagacggggaacggaaagaactaccgagggaccatgtccaagacgaagaacggtatcacctgtcaaaagtggtcatcgacctcgccacatagacctcgcttttcccctgccacccatccatccgaaggactcgaggaaaactactgtcgcaatcccgacaacgaccctcagggaccttggtgttacaccaccgaccctgaaaaacgttacgactactgtgatattctcgagtgtgaagaagagtgtatgcattgttccggggagaactacgacgggaagatttctaagaccatgtcgggtttggaatgccaggcttgggattcacagtcccctcacgcacatggatacattccatcgaaatttcctaataagaacctcaagaagaattactgcagaaacccggatagggagcttcgtccatggtgttttaccactgatcccaataagcgttgggagctgtgtgacatccctaggtgcacgactcccccaccctcctcgggtcccacctaccaatgccttaaggggactggtgagaattaccggggcaacgtcgcagttacggtatcggggcacacctgtcaacattggtcggcacaaacccctcacacccataatcgtactccagagaattttccttgtaagaatcttgacgaaaactattgccgtaatcctgacggcaagagagcaccttggtgccatactaccaatagccaggtcagatgggaatattgcaaaataccctcatgtgactcctcacctgtctccactgaacaactggcacctactgcccctccagagttgacccccgttgtgcaggactgctaccacggagacggacaatcgtaccggggaaccagctcgactactaccactggtaagaaatgtcaatcctggtcctccatgacgccacaccggcatcaaaagaccccggaaaactatccaaatgcagggctgaccatgaactattgtcgaaatccggatgctgataagggtccttggtgtttcaccaccgatccaagcgtgcgctgggagtattgtaaccttaagaaatgcagcggtaccgaagcgtctgttgtcgcaccaccccctgtggtgcttctgcctgatgtcgaaaccccatcagaagaagattgtatgtttggcaatggaaagggataccgtggaaaacgggccactacggtgactggaactccttgccaggattgggcagcacaggaaccccacaggcattcaatctttaccccagagactaatccgcgggcagggctcgagaagaactactgtagaaatcccgatggggatgttggaggtccatggtgctacaccaccaaccctcgtaagctgtacgactactgcgatgtgcctcagtgtgcagctcctagctttgattgtgggaagcctcaggtcgagcctaagaaatgtcctgggcgcgtggtcggtggctgcgtcgcgcatccgcattcctggccctggcaagtgtccctgagaactcgattcggtatgcacttctgcggaggaacgctgattagtcccgaatgggtactgactgcagcccactgcctggagaaatcacctaggccgagcagctacaaggtgatccttggggcccaccaagaggtgaatctggaacctcatgtccaagagatcgaagtcagcaggctgttcctggaacccacccggaaggatattgcgcttttgaagctgtcatccccggcagtgattacggataaggtgattccagcatgcctgccatcccctaattacgtggtggcagatcgcactgaatgcttcattaccgggtggggtgaaactcagggtacgttcggcgccggactgctcaaggaagcccagcttcctgtgatcgagaataaagtgtgcaacaggtacgaatttctgaacggccgcgtgcaatccaccgaactttgtgcaggacatctggccggaggtaccgattcatgtcagggtgatagcggaggaccgcttgtgtgcttcgaaaaagacaagtacatccttcagggggtaacgtcgtggggactgggatgtgcacggccaaataagccaggtgtctacgtccgggtcagcagatttgttacttggatcgagggagtgatgcggaacaat

SEQ ID NO: 250898 - DNA, 2430 bp, synthetic construct
  misc_feature 1..2430: note = Description of Artificial Sequence: Synthetic coding sequence
  source 1..2430: mol_type = other DNA
atggagcacaaagaggtcgttctgctgttgttgctgttcttgaagagcggacagggggaacctttggacgattacgtcaacactcagggagcgagtctcttctcagtcacgaagaagcaactcggtgcgggcagcatcgaagagtgcgccgctaagtgtgaggaagatgaagagtttacttgtcgggcgttccagtatcactccaaagagcaacagtgcgtgatcatggcagagaacagaaagtcctccattatcattcggatgagagacgtcgtgttgtttgaaaagaaggtgtacctgtccgagtgtaagacgggcaacggaaagaattaccgcggtaccatgtctaagaccaagaacggaatcacctgccagaagtggtcgagcacttccccgcacaggccacggttctcaccggcgacgcacccatcggaagggctggaagagaattactgtcggaacccagacaatgatcctcaaggtccatggtgctacaccaccgacccggagaaacggtatgattattgcgacatcctggagtgcgaagaagaatgtatgcattgttcgggtgagaattacgacggtaaaatctcaaaaaccatgtccgggctcgagtgtcaggcttgggatagccagagcccgcatgcccacgggtacatcccatccaagttccctaataagaacctgaaaaagaactactgtagaaatccggaccgggaactgaggccatggtgcttcacgacggatcccaacaagagatgggaattgtgcgacattccacggtgtactactccgcccccatcatccggaccaacgtaccagtgtctcaaaggaaccggagagaattaccgtggcaacgtggcagtaaccgtgagcggccacacttgccagcactggtcggctcaaactccgcatacgcacaatcgcactccagagaatttcccgtgcaagaacctggatgagaactactgccgcaaccctgacggcaaacgggctccatggtgtcatacgacgaacagccaggtgcgctgggagtactgcaagatcccaagctgcgattcatccccagtctcaactgagcaactggccccgactgcgcccccagagttgactcccgttgtccaggactgctaccatggagatggccaatcgtaccgcggcacgtcgtccaccaccactactggaaagaagtgccagagctggagctcaatgaccccgcaccgacatcaaaagactcccgagaactacccgaacgccgggctcaccatgaactactgtcggaatccggacgcagataaaggcccgtggtgctttaccacggacccgtccgtcagatgggaatactgcaacctcaagaaatgctccgggaccgaagcgagcgtggtggcacctccgcccgtggtcctgctcccggacgtggaaaccccaagcgaagaggactgcatgttcggtaacggaaaggggtacagaggaaagcgggcaacgactgtgaccggaacgccgtgccaggactgggcggcgcaagagccgcatcggcattctatcttcaccccggagactaacccgcgcgccggcttggaaaagaattactgccggaatccagacggagacgtggggggaccgtggtgttacactaccaatccaaggaagttgtacgactactgcgatgttccgcagtgcgctgccccgagcttcgattgtggcaagccacaggtggaacccaagaagtgcccagggcgagtggtgggaggatgcgtcgcgcacccgcattcctggccgtggcaggtcagcctgcggaccaggttcggaatgcacttttgcggaggaaccctgatttcgccggaatgggtgctcactgccgcacactgtcttgaaaagtctcctcgcccgtcctcctataaagtgatcctgggcgctcaccaggaagtgaacctggagccacacgtgcaagagattgaagtctcacggctcttccttgagcccaccagaaaagacatcgctctccttaagctgtcaagcccagccgtgatcactgataaggttatcccagcttgcctgccgtcaccaaactacgtggtggctgacagaaccgagtgctttatcaccggttggggggaaacccaaggaaccttcggagccggactgctgaaggaggcccaactgccggtgatcgagaacaaagtgtgtaatagatatgaattcttgaacggccgcgtgcaatcgactgagctgtgcgccggccacttggcgggtggtaccgacagctgccagggagattccggcggacccctggtctgcttcgaaaaggacaaatacatcctgcaaggagtcactagctgggggctgggctgcgcacgccccaataaacctggagtgtatgtgagagtgtccaggtttgttacttggatcgaaggagtgatgcgcaacaat

SEQ ID NO: 250899 - DNA, 2430 bp, synthetic construct
  misc_feature 1..2430: note = Description of Artificial Sequence: Synthetic coding sequence
  source 1..2430: mol_type = other DNA
atggaacataaagaagtggtgttgctccttctactgttcctcaaatcaggacagggagaacctctcgacgactatgtgaatacacagggagcgtccctgttctctgtcactaaaaaacaacttggagctggaagtatagaagagtgtgccgcaaaatgtgaagaggatgaagaattcacatgtcgcgccttccagtatcactccaaagagcagcagtgtgtgataatggcagaaaataggaaatcctctataataatacgaatgagggatgttgtgctcttcgaaaaaaaagtatacctgagtgagtgtaaaactgggaatggaaaaaactatcgcggaacaatgtctaaaacaaaaaatgggattacttgtcagaaatggtcatcaacttccccacatcggcccagattctctcccgctactcatccctcagaagggcttgaagaaaactattgcagaaaccccgataacgatcctcaagggccatggtgttatactacagatcccgagaaaaggtatgattattgtgatatcctagagtgcgaagaagaatgcatgcactgctctggggaaaactacgatggaaaaatttccaaaacaatgagtggattagaatgtcaggcttgggactcacagagtccccacgctcatggatatatccctagtaaattccctaataaaaacctgaaaaaaaattattgtcgcaatcccgatagggaactcaggccatggtgtttcactactgatcccaataaacgatgggaactctgcgatattccgcggtgtacaacacctcctccatcctccggaccaacataccagtgtctgaaaggaacaggggaaaactatcgcgggaacgtcgccgtgactgtatctggacatacttgtcagcattggtcagcccaaactccccatactcacaatagaacaccagaaaattttccttgtaaaaacctggatgaaaactattgccggaatcccgatgggaaaagagccccatggtgccacactactaactctcaggtgagatgggagtattgtaaaatcccttcctgcgatagttctcccgtgtccacagaacagctcgcccctacggctccacccgaacttacacctgtggtgcaggattgctatcacggggatggacaatcctatcggggaacttcgtcaactactacaacaggaaaaaagtgccagtcttggtctagtatgactccgcaccggcatcagaaaacaccagaaaactaccccaatgccggactgactatgaattattgcagaaatcccgatgctgataaaggaccctggtgtttcacaacagatccatctgtcaggtgggaatattgcaatctgaaaaaatgctccgggactgaggcatctgtcgtggcgccacctcctgtagttctcctgcccgatgttgaaactccaagtgaagaagattgcatgtttgggaatggaaaagggtataggggaaaaagagccactacagtgacaggaactccctgtcaggattgggcagcccaggaaccacaccgccattcaatatttactccagagacaaaccctcgcgctgggctagaaaaaaactactgcaggaatccagatggagatgtgggaggaccttggtgttatactacaaatccacgcaagctatatgattattgcgatgtgccccaatgtgctgccccctcattcgattgtggaaaaccacaggtagaacccaagaaatgccccgggcgggtggtgggggggtgtgtggctcatcctcactcctggccttggcaggtatccctccggacgcgcttcggaatgcacttttgtggagggactctcatctcaccagaatgggtccttacggcagcacactgtttagaaaaaagtcctaggccctcttcatacaaagtgattctgggggcacaccaggaggtgaatcttgagccccatgtgcaggaaatcgaagtatccagactgttcttggagcccactcgaaaggacattgcacttttaaagctttcctcacctgctgtcataacagataaagtgatacctgcttgcctcccctcacctaactatgttgttgcggataggacagagtgtttcatcactggatggggggaaacacagggaacattcggagccggattgctgaaagaagcccagttgcccgtaatcgaaaataaagtttgcaacagatatgaatttttgaacggaagggtgcagtctactgaactgtgcgcgggacatctggctggaggaacagattcgtgccagggggattccggggggcctctcgtgtgtttcgaaaaagacaaatatatactacagggagtaacaagttggggactcgggtgtgcccggcccaacaaaccaggggtgtacgtaagagtaagtaggttcgtgacttggatagaaggggtgatgagaaataac

SEQ ID NO: 250900 - DNA, 2430 bp, synthetic construct
  misc_feature 1..2430: note = Description of Artificial Sequence: Synthetic coding sequence
  source 1..2430: mol_type = other DNA
atggagcataaagaagtcgtgctcctccttctgctgtttctgaagagcggtcagggagaacctcttgatgattatgtcaacactcagggggcatcattgttttcagtgaccaagaagcagctgggagccgggtccatcgaggaatgtgcagccaagtgtgaagaagatgaggaatttacgtgcagggcatttcaataccactccaaggaacagcaatgcgtgataatggcagagaaccggaagtcaagcatcatcatcagaatgagggatgttgttctgttcgaaaagaaggtgtacctttccgagtgcaagactggaaatggtaaaaactaccgcggaacgatgagcaagactaagaacggcattacttgtcaaaaatggtcatcgacttccccccatcgcccgcggttttcccctgctacccatccgagtgagggactggaagaaaactattgccggaaccctgataacgatccacaaggaccctggtgctacactacggatcccgagaagagatatgattattgcgacatactcgaatgcgaggaagaatgcatgcactgttcgggggaaaactatgacggaaagatttctaagaccatgtcgggtcttgagtgtcaggcatgggatagccagtcgccgcacgcccacggttacattccttcgaagtttccaaacaagaacttgaaaaagaattactgtagaaacccagatcgagaactgcggccatggtgcttcactaccgaccctaacaagagatgggaactttgcgacattcctagatgcactacccctcctccatccagcggcccaacttaccagtgtctgaaaggaaccggcgagaactacagaggtaacgtcgccgtgaccgtgtcgggacatacctgtcagcattggtcagctcaaacccctcacactcacaatcgaactcctgagaactttccatgtaagaatctcgacgagaactactgtaggaaccctgatggaaagagagccccttggtgccatactactaactctcaagtgagatgggaatactgtaagattccatcgtgtgattcgtcaccagtctccactgagcaacttgcaccaactgcgccaccagaacttactcctgtggtgcaggactgttaccacggagacggccagtcgtacagggggaccagctcaaccactaccaccggaaagaaatgtcaaagctggtcctcaatgaccccacacagacatcaaaaaaccccggagaactaccctaacgccggccttactatgaactattgcagaaatcccgacgcagataagggcccatggtgttttactactgaccctagcgtgagatgggagtattgcaatctcaagaagtgttcgggtaccgaagcatcggtggttgcacctcccccggttgttctcctgcctgacgtcgaaactccttcagaagaggattgtatgttcggtaatgggaagggatacagagggaagagggccaccactgtgacgggaaccccatgtcaagattgggccgcgcaagaaccccaccgtcactcaatctttacccccgaaaccaacccacgggcaggtcttgaaaagaactactgtcgcaaccccgacggggacgtggggggaccctggtgttacactactaacccacgcaaactctacgactactgcgatgtgccccaatgtgcagcaccctcattcgactgtggcaaaccacaagttgaacctaaaaagtgtcctggaagggtggtgggcgggtgcgtcgctcatccccactcctggccttggcaagtgagcctgaggacccgttttggcatgcacttttgtggaggtacccttatttctcctgaatgggtcctgactgccgcacattgcctggaaaagtctccacgacctagctcctacaaggtgattttgggagcacaccaggaagtcaaccttgaacctcatgttcaggaaattgaagtgtcacggctttttcttgagcctactcggaaagatattgctctgctgaaactttcctcgcctgccgtcattactgataaagtgatccctgcatgcctgccttcgccaaactacgtcgtggcagatagaactgagtgttttatcaccggatggggtgagactcaagggacgttcggagcggggctgctcaaggaggcacagctcccagtcatcgagaataaagtgtgcaaccgttacgagttccttaatggacgcgtgcaatccaccgagctttgtgcgggacatctggcaggtggtaccgattcatgtcagggagattcaggtggaccgcttgtgtgttttgaaaaggataagtatattctccagggagtaacttcatggggcttgggatgcgcaaggcctaataagcccggggtgtacgtgcgagtctcccgatttgtgacctggattgaaggagtcatgagaaacaac

SEQ ID NO: 250901 - DNA, 2430 bp, synthetic construct
  misc_feature 1..2430: note = Description of Artificial Sequence: Synthetic coding sequence
  source 1..2430: mol_type = other DNA
atggagcacaaggaggtagtgctcctactgctcctgttcctcaagtcgggtcaaggtgagcccttagacgactatgtaaacacgcagggagcgagcctgttcagcgtgaccaagaagcagctcggcgcgggttctatcgaggagtgtgccgccaagtgtgaagaagatgaggagttcacatgtcgcgcctttcagtaccacagcaaggagcagcagtgcgtgatcatggccgagaaccgaaagagctccataattattcgtatgcgcgatgtcgtgcttttcgagaagaaagtctacctctcagaatgtaagacgggaaatggaaagaactaccgcgggaccatgtcgaagaccaaaaatggtatcacctgccagaagtggagctccaccagccctcaccgaccgcgcttcagtcctgccacccatccgtctgagggcttagaggaaaactactgccggaacccggacaacgatccccaggggccgtggtgttacaccaccgaccccgaaaaacgctacgattattgcgatatcctcgaatgtgaggaagagtgcatgcattgcagcggggagaactacgacggcaaaatctccaaaacgatgagtggtctcgaatgccaggcttgggattcccagtctccccacgctcacggctacatcccctctaaatttccgaacaaaaacctcaagaagaattactgccgtaaccccgatcgcgagcttcggccctggtgtttcaccactgaccccaacaagcgttgggagctctgtgacattccccggtgtaccactcctcccccgagttctggccccacttaccagtgcttgaaggggaccggggagaactaccgcggaaacgtcgcggtcactgttagcggccacacgtgtcagcattggtccgctcaaaccccgcatacgcacaatcgcaccccggaaaatttcccatgtaagaacctggatgagaactactgccggaatccggatggtaagcgtgcgccctggtgccacaccaccaatagccaggtacgttgggaatactgcaagatcccctcctgtgactctagtcccgttagtacggagcagctggcgcccacggctcccccggagctgacaccagtcgtccaggactgctaccacggagatggtcaatcttatcgcgggacctctagcaccacaactactggcaaaaagtgccaatcctggtcgtctatgacgcctcatcgacatcagaagactcctgagaattaccccaatgccggcctgaccatgaactactgtcgcaatcctgatgctgacaagggtccctggtgcttcacaactgatcctagtgtgcgttgggagtactgcaacctcaaaaagtgttccggaaccgaggcttccgtcgtcgcccctccacccgtcgttctgcttcctgatgtcgagacccctagtgaggaagattgcatgttcggcaacggtaagggctaccgtggcaagcgtgcgacgacggtcacgggcaccccatgtcaggactgggctgcgcaggagcctcaccggcattccatcttcacccctgagaccaaccccagagcgggtttggaaaagaattactgcaggaatcctgatggtgatgtgggcggcccgtggtgctatacgactaatccacggaagctctatgactattgtgatgtccctcagtgtgcagcaccatctttcgattgtggtaagcctcaagtggagcccaagaagtgccctggccgcgtcgtcggcggatgcgtcgcccacccccattcgtggccgtggcaggtgtcccttcgtacgagattcggtatgcacttttgcggcggaactctcatctctcccgagtgggttctaaccgccgctcattgtttggagaagtctccacgccccagttcctacaaggttattctcggtgcacaccaagaggtcaacctggaaccgcacgtccaggagatcgaggtgtctaggctcttcttggaacctacccggaaggatattgccctcctcaagctcagctccccggcggttattaccgataaagtcatcccagcctgccttccgtccccgaattatgtcgtcgcggatcggactgagtgctttatcaccggctggggcgagacccagggcaccttcggtgctggcctgctcaaggaggcccagcttcccgtaattgagaacaaggtctgtaaccgctatgaattcctcaatggcagggtgcaaagtactgagttgtgcgcaggtcacctggcaggtggaacagattcctgccagggcgactccggcggacctctcgtctgctttgagaaggataagtacatccttcagggtgtaacctcctggggtctgggttgcgccaggccaaacaagcccggcgtctacgttcgcgtgtcccggtttgtcacctggattgagggggttatgcgcaataac

SEQ ID NO: 250902 - DNA, 2430 bp, synthetic construct
  misc_feature 1..2430: note = Description of Artificial Sequence: Synthetic coding sequence
  source 1..2430: mol_type = other DNA
atggaacataaagaagtggttctcctcctgctcctgtttctgaagtctggccaaggggagcccttggatgattatgttaatactcagggagcttcgctgttcagcgtgacaaaaaaacagctgggagccggctcaatcgaggaatgcgcggccaaatgcgaggaggatgaagaatttacgtgtcgcgcttttcagtatcactccaaggagcagcagtgtgtgatcatggccgagaatagaaagagttctatcattatccgaatgcgcgacgtagtgttgtttgaaaagaaggtctatctgtccgagtgcaagacggggaatgggaaaaattaccgaggcacaatgtcaaagactaagaacggaatcacctgtcagaaatggagtagtactagcccacacagaccgcgcttttccccagccacacacccttctgagggtctggaggagaactattgtagaaatccggacaatgacccgcagggtccgtggtgttacactaccgatcccgaaaagcgctacgactactgcgatattctggagtgtgaggaagagtgcatgcactgttccggtgaaaactacgatggcaagatctccaagacaatgagcggactggagtgccaggcctgggatagccagtctcctcatgctcatggctatatccctagcaagttccctaacaaaaatttaaaaaaaaactattgcagaaaccccgatcgggagctccggccatggtgcttcacaaccgatcccaacaagcggtgggagttgtgtgatattccgcgctgtacaactcctccacccagttctggccctacgtatcagtgtctgaaaggtacaggggagaactatcggggcaatgtagctgtgaccgtatcaggacatacttgtcaacattggtcggcccaaacacctcacactcacaataggacacccgaaaatttcccctgtaagaatctcgatgagaactattgtcgcaacccagatggaaaacgcgcaccttggtgccacacgacaaatagtcaggtgcggtgggagtactgtaagatcccgtcgtgcgattcctccccagtctctaccgagcagcttgcccctaccgccccgcctgagttaactcccgtagtgcaggactgttaccacggagacggccagtcttacaggggaacatcctccacaaccaccacaggcaaaaaatgtcaaagctggtcgtctatgaccccgcatagacaccagaaaacccccgaaaactaccctaacgctggtctgacaatgaattactgtaggaatccggatgcggacaaggggccttggtgctttaccaccgacccttcggttaggtgggagtactgtaacctcaaaaagtgttcaggaacagaagccagtgttgtggctccaccccccgtagttctgctgccagacgtagagaccccttccgaggaggattgtatgttcggcaatggtaaaggctatcgcggcaagcgggcaactaccgtcacaggaaccccttgccaggactgggccgcccaagagccacacaggcactccatcttcactccggagaccaatccacgagccggactcgaaaaaaactattgcaggaacccagacggggatgtcggcgggccctggtgctatactacaaatcctaggaagctgtatgattactgcgatgttcctcagtgtgccgctccttctttcgactgcggtaaacctcaggtggagcccaagaagtgtccaggtagagtcgtcggaggttgcgtggcgcacccccacagttggccctggcaggtgagcctcagaacccgattcggtatgcacttctgtggaggcaccctgatatcccccgagtgggttctgacagcggcccattgccttgaaaagtccccccggccctcgtcatacaaggtgattctgggtgctcaccaggaagtgaacttggagcctcacgtgcaggaaatcgaagtgagtaggctttttctggaaccaacccggaaggatattgccctcctgaaattaagttctccagcagttatcacagacaaggtgatacctgcctgcctgccttcacctaattacgtcgttgccgacagaaccgagtgtttcatcacagggtggggcgaaactcaggggacatttggggcagggctgctgaaagaagcacagctccctgtcatcgaaaataaggtttgcaatagatatgagtttctgaatggaagagtacagagtaccgaactctgcgccggccatctcgctgggggcacagacagttgtcagggtgatagcggcggacccctggtgtgttttgaaaaagacaaatacatcctgcaaggggtgacttcctggggcctgggatgcgctcgtccaaacaaaccgggtgtctacgtgagagtctccaggttcgtgacttggatcgagggtgtgatgcgcaataat

SEQ ID NO: 250903 - DNA, 2430 bp, synthetic construct
  misc_feature 1..2430: note = Description of Artificial Sequence: Synthetic coding sequence
  source 1..2430: mol_type = other DNA
atggagcacaaggaagtcgtgctgcttcttcttctttttctcaagtccgggcaaggtgagcccctggatgattacgtgaacacgcagggcgcaagccttttttcggtgactaagaagcaactcggggccggttcgatagaagagtgcgcagctaagtgcgaagaagatgaggaattcacttgtagagcttttcaataccactcaaaggaacagcaatgcgtgattatggccgaaaatcgaaaatcctcgatcattatcagaatgagagatgtggtgctgtttgagaagaaggtctatctttcagaatgcaagacgggtaacggcaaaaactacaggggcactatgtcaaagactaagaacggaattacctgtcagaagtggagcagcaccagtccgcacaggccaaggttctcgccggcaacccatccgtccgaagggctcgaagaaaactactgtcgaaatccggataacgatccacagggtccgtggtgttacaccaccgacccggaaaagcgctacgattactgcgacattctggagtgtgaagaagaatgtatgcattgttcaggggagaattatgacggaaagatctctaaaaccatgtccggacttgagtgtcaagcatgggactcgcagtcccctcatgcgcatggctacatccctagcaagttccctaacaaaaaccttaagaaaaactactgcagaaacccggaccgggaattgcgtccttggtgttttaccaccgatccgaacaaacgctgggagctgtgtgatattcccaggtgtactacgcctcccccctcgtccggtcctacttatcaatgcctcaagggcaccggagaaaactaccgagggaacgtggccgtgaccgtctcaggtcatacttgtcaacattggtcggcacaaactccacatactcataatcgtactcccgaaaactttccctgcaaaaatctggatgagaactactgtagaaacccggatggaaaacgggccccttggtgtcacaccacgaactcacaagtgagatgggaatactgtaagattccttcctgcgattcctcaccagtctcaactgagcaactggcgcccaccgctccccctgagctgacgccagtggtccaagactgttaccacggcgacggtcaatcgtataggggaaccagctccactaccaccactggaaagaagtgtcagtcgtggtcgtccatgactccacatcgacatcagaaaactccggagaactaccctaatgccgggctgaccatgaactactgccgaaatcctgacgccgataaagggccttggtgcttcaccacggatccatcggttcggtgggagtactgcaaccttaagaagtgttcaggaaccgaagcatccgtcgtggcgcctcctccggtggtgctcctgccggatgtggaaaccccatctgaggaggactgcatgtttgggaatggaaagggatacaggggaaagcgcgcaactaccgtgactggaaccccttgccaggattgggcagcccaggaaccgcatagacactccattttcactccagaaacgaatcctcgagccgggttggagaagaactattgtcggaaccctgatggagacgtggggggaccatggtgttacactaccaatccgcggaagctgtacgactactgtgatgtcccacaatgcgcagctccatccttcgactgcggaaagcctcaagtggaacctaagaaatgtcctggaagagtcgtgggtgggtgtgtggcacacccacacagctggccttggcaggtatccctcagaacccgattcggtatgcacttctgtggaggcactcttatatcgcccgaatgggtgctgactgcagcacactgccttgaaaagtcgccgaggccaagcagctacaaggtgattcttggagctcatcaggaagtgaacctggagcctcatgtgcaggagatagaggtgtcaagactgtttttggagccaaccagaaaggatatcgcgctcctcaagctctcctcgcctgccgtgattactgataaagttattcccgcctgtctcccttcacctaattacgtggtggcggatagaaccgaatgctttatcaccggctggggggagactcaagggacttttggagcgggtctgcttaaagaagcacaactccccgtgattgagaataaggtctgtaatcgatacgagtttcttaacggtcgggtgcaatccacggagctgtgtgcaggacatctggcaggtggaaccgactcttgtcagggggattcagggggcccacttgtctgcttcgaaaaagacaagtacatacttcaaggtgtcacctcctggggcctgggctgtgcacgtccaaacaagcctggtgtgtacgtgcgagtctcaagatttgtgacgtggatcgaaggtgtgatgagaaacaac

SEQ ID NO: 250904 - DNA, 2430 bp, synthetic construct
  misc_feature 1..2430: note = Description of Artificial Sequence: Synthetic coding sequence
  source 1..2430: mol_type = other DNA
atggaacataaggaggtcgttctcttactgctcttgtttctcaagagtgggcagggggagccactggatgactacgtcaatacccagggggcttctctgttcagcgtgactaagaagcaactgggagcagggagcattgaggaatgcgcggccaaatgcgaggaagatgaggagttcacttgtcgagccttccagtaccacagcaaagaacaacaatgcgtgatcatggcagagaaccggaagtcgagcatcatcataaggatgagggatgtagtactctttgaaaagaaggtgtatctgtccgagtgcaaaaccgggaacggcaagaattaccgcggtacaatgtcaaagacgaagaatggcatcacatgtcagaaatggtcctcaacctcgccccaccgtccccgtttttcacctgcaactcatccttccgaaggactagaagagaactattgtagaaatcccgataatgatccacaagggccgtggtgttatacaactgatcctgaaaagcgctacgactattgcgacatcctggagtgtgaagaggagtgtatgcactgctccggagaaaattatgacggaaaaatatccaagacaatgtccgggctggagtgccaggcttgggactcccaaagtccccacgctcacggctatatcccaagtaaatttccgaacaagaacttgaagaaaaattactgcaggaaccccgacagagaactgaggccctggtgtttcacaacagatcctaacaagaggtgggagctgtgcgacatccccagatgtaccacaccccctccatccagtgggcccacatatcaatgtttgaaagggaccggagaaaattatcgaggcaacgtggccgtaaccgtctcaggccatacatgccagcattggtccgcccagacgcctcacacccacaataggacacccgagaactttccatgcaagaacttggacgaaaactactgcaggaaccctgacggtaagcgtgccccttggtgtcacacaacgaattctcaggtccggtgggagtattgcaagataccttcctgcgacagttccccagtaagtacagaacagctggcacctaccgcgcctcccgagctcaccccagtcgtgcaggattgctaccacggagacggacaatcataccgcggtacgtcctcgaccacaaccactggaaaaaagtgccagtcatggagttccatgactccgcataggcatcagaagaccccggaaaactaccccaacgccggcctgactatgaattactgccgaaatccggacgcagacaaggggccgtggtgtttcaccactgatccaagcgtccgatgggaatattgtaacctgaaaaagtgttcgggcacggaggcttctgttgtagccccgccccccgtggtcctgctgcccgacgttgagaccccttcggaggaagattgtatgttcgggaacggcaagggctacaggggtaaacgggccaccactgtcaccgggactccttgtcaggattgggcagctcaggagcctcacagacattctatatttacacctgaaacgaatccaagagcagggctggaaaaaaactactgccgcaaccccgatggggacgttggaggaccatggtgctataccacaaatccccgaaagctatatgactattgtgacgttccacagtgtgctgccccaagctttgattgtggcaagcctcaagtggagccaaaaaagtgcccgggcagagttgtgggcggttgtgtggctcatccccatagctggccttggcaggtgagcctccgcacgcgatttggtatgcacttttgtggaggaaccctaatatcacccgagtgggtgctgaccgccgcccattgcctggaaaaatccccaagaccctcttcttacaaggtgattctgggggcacatcaggaggttaatctggaacctcacgttcaggagattgaagtgagtcggctattcctagagccaacccgcaaggacatcgcgctattaaaactatccagtccggctgttatcaccgacaaggtaatccctgcgtgcttgccaagcccaaattacgttgtagctgataggacagaatgcttcattacgggctggggcgaaacacaaggcacgttcggggcgggcttgctgaaagaggctcagctgcctgtcatcgaaaacaaagtgtgtaatagatacgaatttctcaacggacgcgtccagtccaccgagctgtgcgctggccatctcgcaggcggaacagatagttgtcaaggagactcagggggcccccttgtctgtttcgagaaggacaaatatatcttacagggagtgacgagctgggggctgggatgtgcccgtccaaacaagccaggcgtctacgttcgcgtgtctcggttcgtgacctggattgaaggggtgatgaggaacaat

SEQ ID NO: 250905 - DNA, 2430 bp, synthetic construct
  misc_feature 1..2430: note = Description of Artificial Sequence: Synthetic coding sequence
  source 1..2430: mol_type = other DNA
atggaacataaagaagtggtgctgctgctgttactcttcctgaaatcagggcagggggagcccctggacgactatgttaatacacagggagcctcgctgttttctgtgaccaaaaaacagctaggggcggggtccatcgaggaatgcgcagccaaatgtgaggaggatgaagagttcacctgccgagccttccagtaccacagtaaggaacagcagtgcgtcatcatggcggaaaataggaaatcttctatcataatacgaatgagagatgtggtgctattcgaaaagaaggtgtacctgtcagagtgcaaaaccggcaatggaaagaactaccgcggcactatgtccaagaccaaaaatggcataacgtgccaaaagtggtcgagcaccagtcctcaccggccgcgcttctcacccgcgacacatccttctgagggattagaagagaattattgtaggaacccagacaatgatccccaggggccatggtgttacacaactgatcctgagaagaggtatgattactgcgacatcctagagtgtgaggaagagtgtatgcactgctctggagagaattacgatgggaagatttcaaagacaatgagtggcctcgaatgccaggcttgggactcacagagcccacatgctcatgggtatatcccttcgaagttcccaaacaagaacctgaagaagaattattgcaggaaccctgacagggagctgcggccgtggtgctttaccacagatccaaacaaacgatgggaactgtgcgatattccccggtgcaccacaccacctccaagctcaggccctacctatcagtgcctcaaaggaactggcgagaactaccgcggaaacgtggcggtcaccgtctccggccacacatgtcagcattggtccgcgcagactccgcacacccataaccgaaccccagagaattttccctgcaagaacctagacgagaattattgcaggaaccccgacgggaagcgggccccttggtgccacaccaccaactcccaggtgcggtgggagtactgtaagatcccgagctgcgatagttctcccgtgtctaccgagcagctggcaccaacggctccgcccgaactgacacccgtggtgcaagattgctaccacggggatggccagtcataccgggggacctcgtcaactaccactacaggaaaaaagtgccagtcttggtcgtcaatgactccccatcgccatcagaaaactccagaaaattatcctaacgccggactgaccatgaattattgtcgcaatcctgacgccgacaagggtccatggtgctttaccacggatccctccgtacggtgggagtactgtaacctgaaaaaatgctcaggcaccgaagcttcagtcgtcgctcccccacccgtcgtactactgccagacgtggagactccgagcgaggaggattgtatgttcggcaatgggaagggatatcggggcaaaagagcgactaccgtaactggcacaccttgccaggattgggctgcccaggagccacatcgacactccattttcacacccgaaaccaatccgagggcagggttggagaagaattactgtaggaaccctgacggggatgtgggaggaccttggtgctacaccactaaccccaggaaactatatgactattgtgatgtgccacaatgtgccgctccgtcattcgattgtggaaagccccaggtagagcccaagaagtgtccaggaagggtagtgggaggctgtgtcgcacatccacactcctggccctggcaggtaagcctcaggaccagattcggcatgcacttctgtggggggacacttatcagtcctgaatgggtattaactgccgcccactgtcttgagaaatcaccgaggccgtcttcctataaggttatcctcggtgcgcatcaagaggtgaacctcgagccccacgtccaagaaatcgaggtctctagactatttctggaacctactcgaaaggacatcgccctcctgaaactgtcctccccagccgtcattacagacaaggtcatacccgcgtgtctaccctcccctaattatgtggtggcagacaggaccgagtgcttcatcacggggtggggcgaaacacaaggcactttcggagcgggactactcaaagaagcccagcttccagtgatcgagaataaagtctgtaatcgttacgaattcttgaatggaagggtgcagagcaccgaactctgtgccggccacttagcaggcggcaccgactcatgccagggggacagcgggggccccctggtgtgttttgaaaaggacaagtacattttgcagggggtgacctcctggggcctaggatgtgctagacctaacaaacctggcgtttacgtgcgggtgtcaagattcgttacatggattgaaggcgtgatgcgtaacaac

SEQ ID NO: 250906 - DNA, 2430 bp, synthetic construct
  misc_feature 1..2430: note = Description of Artificial Sequence: Synthetic coding sequence
  source 1..2430: mol_type = other DNA
atggagcataaggaggtcgtcttgctcctgctcctgttcctgaagtcgggacagggagaaccactggacgactacgtcaacactcagggggcaagcctgttctcggtcaccaaaaagcagctcggcgcaggatcgatcgaggaatgcgctgcaaaatgtgaagaggacgaagagttcacctgcagggcctttcagtatcactcgaaggaacaacaatgcgtgatcatggccgaaaaccgcaagtccagcatcatcattcggatgcgggacgttgtgctctttgaaaagaaggtgtaccttagcgaatgcaaaaccggaaatggaaagaattaccggggcactatgagcaagaccaagaatggcatcacttgccagaaatggtcgtcgaccagccctcacagaccccggttcagcccggctacccatccgtcggagggattggaagaaaactactgccgcaacccagataacgacccgcaagggccgtggtgctacacgacggacccggaaaaaagatatgattactgcgatatactggagtgcgaagaggaatgtatgcactgttccggggagaactacgacggaaagatcagcaagacgatgagcggactggaatgtcaagcctgggactcccagtccccgcacgcacatggttacatcccttcgaaattccccaataagaatctgaagaagaattactgccgtaacccggatcgcgaactgcgcccgtggtgcttcacgaccgatccgaacaagagatgggagctttgcgatattccacggtgcacgacccctccgccatcctccggaccgacctaccaatgcctcaagggaacgggtgagaactatcgtggaaatgtggctgtgactgtgtccggtcacacgtgccagcattggagtgcacagactcctcatactcacaacaggaccccggaaaacttcccttgcaaaaacctggacgaaaactattgcagaaatcccgacggaaagagagcgccatggtgccataccaccaattcgcaggtgaggtgggagtactgtaagatcccatcatgtgactccagcccagtgtccaccgagcagctggcgccaaccgcccctccagaattgacgcccgtggtccaggactgctaccacggagacggccaaagttacagaggaacctcatcaactaccaccactggaaaaaagtgccagtcgtggagctcgatgactccacatcgacaccaaaagactccagaaaactacccgaatgctggactgacgatgaactactgccggaatcctgatgccgacaaaggaccctggtgtttcactacggatccgtctgtcagatgggaatactgcaatctgaaaaagtgctcaggcactgaggctagcgtcgtggctcctccgccggtggtgctgctcccggatgtggaaactccatcagaggaggattgtatgtttgggaacggaaaggggtaccgcggaaagcgcgctaccactgtgaccggaactccctgccaagactgggcggcccaggaaccacaccgccactccatctttaccccagaaactaacccccgggcaggcctggagaagaactactgcagaaacccggacggtgatgtcggaggtccctggtgttacaccactaatcctcggaagctgtacgattattgcgacgtcccgcagtgcgccgcaccctcatttgattgcggcaagccacaagtcgaaccgaagaagtgcccgggtagagtggtcggcggctgtgttgcacacccgcattcatggccttggcaagtttccctcagaacccggttcgggatgcatttctgcggcggaactttgatatcaccggagtgggtcctgactgctgcgcactgtctcgaaaagagcccacgcccgagcagttacaaggtgattctcggggctcaccaggaggtgaacctggaaccacacgtccaagagattgaagtgtcccgcctcttccttgaacccacccgcaaagatatcgcccttctgaaactgtcctcccctgccgtgatcactgacaaagtgatccctgcatgtctgccgtccccaaattacgtggtggctgaccgcactgagtgtttcatcactggatggggagagacgcaggggacctttggagccggtcttttgaaggaggcacagctccccgtgatcgaaaacaaggtctgcaaccgctacgaattcctcaacggaagggtgcagtcgaccgaactgtgtgccggccaccttgcaggagggaccgactcctgccaaggcgactcgggcggaccgcttgtgtgcttcgagaaggacaaatacatccttcagggggtgacctcctggggactggggtgcgcacgtcccaacaaaccaggggtctacgtgcgggtgagccggttcgtaacttggatcgagggcgtcatgaggaacaac

SEQ ID NO: 250907 - DNA, 2430 bp, synthetic construct
  misc_feature 1..2430: note = Description of Artificial Sequence: Synthetic coding sequence
  source 1..2430: mol_type = other DNA
atggaacacaaagaagtggtgcttctgctgctgctgtttctgaaatcaggccaaggagagccattggatgactacgttaacacccagggggcctcactcttttcggtgactaaaaagcagctgggcgccgggtcgatcgaagaatgtgcggctaaatgtgaagaagatgaagaatttacctgtcgcgctttccaataccattctaaggaacagcagtgcgtgattatggcagaaaacagaaaatcatcgatcatcattagaatgcgggatgtcgtcctttttgagaaaaaggtgtacctgtccgaatgtaagactggaaacggaaagaactacaggggaacgatgtccaagactaagaacgggataacttgccaaaagtggtcctcaaccagcccccatcgacccaggttctccccagcaacccacccctcggaaggactcgaggaaaactactgtaggaacccagataacgatccacaaggcccctggtgttacaccaccgatccggaaaaaaggtacgactattgtgacatcctggagtgcgaagaagaatgcatgcactgttcaggagaaaactatgacggaaaaatctcaaagactatgtcaggacttgagtgtcaagcctgggacagccagtcgccacatgcacatggttatatcccgagcaagttccccaacaagaatctgaagaagaactactgccgaaatccagatagagaacttcgcccctggtgcttcaccactgatccaaacaagagatgggagctttgcgatattcctagatgtactactccacctcctagcagcggacccacttatcaatgtctgaagggaactggtgaaaactacagaggaaatgtggcagtcacggtgtcgggtcatacctgtcagcattggtcagcacaaactcctcatacccataacagaaccccggaaaactttccttgcaaaaacctggacgagaattactgtagaaatcctgatgggaagagagcaccttggtgccatacgacgaactcgcaagtgcgctgggaatactgcaagatcccgtcgtgtgatagctcacctgtgtcaaccgagcagctggcaccaactgctcctcccgagcttactcctgtcgtccaggattgctaccacggtgatggacagagctaccgggggaccagctcgaccaccaccaccgggaagaagtgtcaatcgtggtcctctatgacccctcaccggcaccaaaagaccccagaaaactacccaaatgccggcttgactatgaattactgtcggaatcctgatgccgacaaaggaccttggtgctttaccaccgatcctagcgtccggtgggagtactgtaaccttaagaagtgttcaggaactgaagcatcggtggtggcaccgcctccagtcgtgttgcttccagatgtcgaaaccccttccgaagaagattgtatgtttggtaatggtaaaggttaccggggaaaacgagcaacgaccgtgactggtaccccgtgccaagactgggccgcacaggagccacaccggcattccatcttcacccccgaaaccaacccacgtgcaggtctggagaagaactattgtcgcaacccggacggggacgtgggaggaccctggtgctacactactaacccaagaaagttgtacgattactgtgatgtcccacaatgcgcagcaccctcctttgattgtggcaagccacaagtggaacctaaaaagtgccccggacgggtggtgggaggatgtgtggcccatccccattcttggccttggcaggtgagcttgcggactcgttttggaatgcacttttgcggcgggaccctgatttcaccagagtgggtgcttacggcagcacactgtcttgagaagtcaccgcggccgtcatcctacaaggtgatccttggtgcacaccaagaggtcaacctcgaaccacatgtgcaggagattgaggtgtcgcgtctgttccttgaaccaacccgtaaggatatcgcactgctgaagctcagctccccagccgtcattaccgataaagttattccggcatgcctgccttcgccaaactacgtcgtggcggaccgtaccgagtgtttcatcactgggtggggtgaaacccagggtactttcggtgccggccttctcaaagaggcgcaactgcccgtgattgagaacaaagtgtgcaatcgctacgaattcctcaacggacgtgtccagtcaactgagctgtgtgcggggcatcttgctgggggaaccgattcctgtcagggagactccggtggaccactcgtttgctttgaaaaagataagtacatccttcaaggcgttacgtcatggggcctcggttgtgcccgccctaataagcctggtgtttatgtgagggtgtcaaggttcgtgacctggattgaaggtgtcatgagaaataac

SEQ ID NO: 250908 - DNA, 2430 bp, synthetic construct
  misc_feature 1..2430: note = Description of Artificial Sequence: Synthetic coding sequence
  source 1..2430: mol_type = other DNA
atggagcacaaagaagtcgtgctgctcctgcttctgtttcttaaaagcggacagggagaaccgctggacgactacgtgaacactcagggggcatcgctgttttcagtgaccaagaagcagctgggcgcaggttcgattgaggaatgtgccgcgaagtgtgaagaggacgaagaattcacctgccgggccttccaataccattcaaaggaacaacagtgcgtcatcatggcggaaaacaggaagtcctccataatcatcagaatgagagacgtcgtgcttttcgagaaaaaagtgtacctgtccgagtgcaaaaccggaaacggtaagaattacaggggaacgatgtccaagactaagaacggaatcacgtgtcagaaatggagcagcacttcgccgcaccgcccgcggttctcgccggccactcatccatccgagggtttggaggagaactactgccgcaatccagataacgacccccagggtccctggtgctatactactgacccggaaaagagatacgattactgcgacatattggaatgtgaagaagaatgtatgcattgctcgggcgagaactatgacggcaaaatctcaaagactatgtcgggactcgagtgccaggcttgggattctcagtccccacatgcgcacggatacatcccaagcaagttccccaacaagaatctcaagaagaactattgtcgtaacccggaccgcgagcttagaccctggtgttttactaccgacccgaacaagcgttgggaactgtgcgacatcccgcggtgcactactcctcccccgtcgtccggaccgacttaccagtgcttgaaaggaactggagagaattatcgcggaaacgtggcagtgactgtgtcaggacatacctgccaacactggtcagcgcagacccctcatacccataacaggactcctgagaacttcccttgtaagaacctcgatgagaattactgccgaaatccagatggaaaacgggccccttggtgccacaccaccaactcccaagtcaggtgggaatactgcaagattccgagctgcgattcgtcgccagtctccaccgagcagctggcgccaaccgcaccaccggaactgaccccggtggtccaggactgctaccacggggacggacaatcgtataggggcacctccagcaccactacgactggaaaaaagtgccaatcgtggtccagcatgactccacacaggcaccaaaagaccccggaaaactacccgaacgccggcctcacgatgaactactgcaggaatccggacgcggataagggcccgtggtgcttcacgaccgaccccagcgtgagatgggagtactgcaatcttaagaagtgtagcggtaccgaagcctcggtggtggccccgccgccggtggtgcttctccccgatgtggaaacgccgagtgaagaggactgcatgtttgggaacggaaagggataccgcggcaagcgcgccacgaccgtcaccgggactccatgtcaggactgggctgcgcaagaaccccaccgccacagcattttcactccggaaactaatcctcgagcgggcctggaaaagaattactgcaggaacccggacggagatgtgggcggaccctggtgctacaccaccaatcctagaaagctgtatgactactgcgatgtccctcagtgcgcggcgccatctttcgattgtgggaaaccacaggtggagcctaagaaatgcccgggaagggtggtcggaggctgcgtcgcccatccgcactcgtggccatggcaggtgtcgctgagaacgcgtttcggcatgcacttctgcggcggcaccctgatctcgcctgagtgggtcctgactgcggctcattgtttggagaagtcacctagaccgagcagctacaaggtcatcctgggggcccaccaggaagtgaatttggaacctcatgtccaagaaatcgaggtgtcgcggttgtttcttgaaccaacccgcaaagatatcgctctcctgaaactctcctccccggctgttatcactgataaggtgatccccgcatgcctgccatccccaaactacgtggtggccgatcgcactgaatgctttatcactgggtggggggaaacccaaggaactttcggagccggattgctgaaggaggcgcagctgcctgtgatcgagaataaggtgtgtaaccgctacgaattcctcaatggtagagtgcagtccactgaactgtgtgcgggccacctggcgggagggaccgactcgtgtcaaggagattccggaggacctctggtatgtttcgagaaagataagtacatactgcaaggcgtgactagctggggcctcgggtgcgctcgcccgaacaagcctggggtgtacgtccgggtgtcgcgcttcgtgacttggatcgagggcgtgatgagaaataac

SEQ ID NO: 250909 - DNA, 2430 bp, synthetic construct
  misc_feature 1..2430: note = Description of Artificial Sequence: Synthetic coding sequence
  source 1..2430: mol_type = other DNA
atggagcataaggaggtggttctgctgctcctcctgttcctgaagagcggacaaggagaaccgctggacgactacgtcaacacccagggagcttcgctgttcagcgtcactaagaagcagcttggagcgggaagcatcgaagagtgcgctgcaaaatgtgaggaggacgaagagttcacgtgccgagccttccagtaccacagcaaagaacaacagtgcgtgatcatggccgaaaataggaagtcctcaatcatcattagaatgcgggacgtcgtgttgttcgaaaagaaggtgtacctctccgagtgcaaaaccggaaacggcaagaattacagaggaaccatgtcgaaaactaagaacggaatcacctgccagaagtggtcctcgacgtccccacaccgaccacggttctcgccagccactcacccgtcagagggactggaggagaactactgtcggaaccctgataacgacccgcagggcccgtggtgctacactaccgatccagagaagaggtacgactactgcgacatcctcgaatgtgaagaagaatgtatgcactgctcgggggaaaactatgacggaaagattagcaagaccatgtccgggttggaatgccaggcgtgggattcgcagtcccctcacgcgcatggatacatcccatcgaaattccccaataagaacctcaagaagaattattgccgtaatcctgaccgggaactcagaccttggtgcttcacgactgatcctaacaaaagatgggaactgtgcgacattccgcgctgtactaccccaccgccgtcatccggacccacctaccaatgccttaagggcactggtgagaactacagagggaacgtggctgttaccgtgagcggacatacctgccagcactggtccgcccagactccgcacacccacaaccggaccccagagaattttccgtgcaagaatctcgacgaaaactactgcagaaatccagatggcaagcgcgcgccgtggtgccatactactaacagccaagtgcggtgggaatactgtaaaatcccgagctgcgattcgtctccggtcagtaccgagcagctggcgccaaccgctccgccggagcttactccggtggtacaggactgctaccacggagatggccagtcgtaccgcgggacctcatcgaccaccactactggaaaaaagtgccagtcatggtcctccatgacccctcatcggcaccaaaagaccccagaaaattacccgaacgcaggcctgaccatgaactattgccggaatcctgacgccgacaaaggaccgtggtgttttaccaccgacccatccgtgagatgggagtactgtaacctgaagaagtgctcgggtactgaagcctcagtggttgcgccacccccagtggtgctgctcccagatgtcgaaactccatcagaggaagattgcatgttcggcaacggaaaaggctacagggggaagagggcaactaccgtgacgggtacgccgtgccaggattgggctgcccaagagccgcaccgccattccatctttacgccggagactaatcctcgggccggtctggaaaagaattactgcaggaacccggacggcgacgtcgggggtccctggtgttacaccactaacccccgcaagttgtacgactattgcgacgtgcctcaatgtgcagccccatcgttcgattgcggaaagcctcaggtggaaccgaagaagtgtcccggacgcgtggtgggaggttgcgtggcgcatccccacagctggccctggcaagtgtccctgcggacgcgctttgggatgcacttctgtggcggaactctgatctcgccggagtgggtgctcactgcagcccattgccttgagaaaagcccccgcccgtccagctacaaagtgatccttggagcccatcaggaagtcaatctcgaacctcacgtccaagaaatcgaagtgtcgcgtctctttctggaaccgaccagaaaggacatcgcactgctcaagctgtctagtcctgccgtcatcaccgacaaggtcattccggcctgtctcccgagccctaactacgtggtcgccgaccggactgagtgcttcatcactggatggggcgaaacccaaggcactttcggagcgggcttgctgaaagaggcccaactgcctgtgatagaaaacaaggtgtgcaaccggtacgaatttctgaatggccgcgtgcagtcgaccgagctgtgtgcaggtcatctggctggagggaccgattcctgccagggcgattcaggtggaccactggtctgcttcgagaaagataaatacatcctccagggagtgacctcatggggattgggatgcgcgcgcccgaataagccgggggtctacgtgcgcgtctcacgcttcgtgacttggatcgaaggcgtgatgcgcaacaac

SEQ ID NO: 250910 - DNA, 2430 bp, synthetic construct
  misc_feature 1..2430: note = Description of Artificial Sequence: Synthetic coding sequence
  source 1..2430: mol_type = other DNA
atggaacataaggaggttgttttactgctgcttttgttcctgaaaagcggccaaggagagccattagacgactatgtgaacacacagggcgcgagcctgttcagtgtcacgaagaaacaactgggggccgggtctatcgaggaatgcgccgcaaagtgcgaggaagacgaagaattcacatgtcgcgcctttcagtaccactctaaagagcaacagtgtgtgatcatggccgagaacagaaagagcagtatcatcatcagaatgagggacgtggtcctctttgaaaaaaaggtttatctgtccgaatgtaaaaccggaaatggcaaaaattacagaggcactatgagtaagacgaagaacgggattacctgccaaaaatggagctctacaagcccacaccggccgcggtttagtcccgcaacccacccatcggaaggactcgaggaaaactactgcagaaatcccgataacgatccacagggcccctggtgctatactacagaccccgagaagaggtatgactattgtgatatcctcgagtgtgaggaggaatgcatgcactgttccggtgagaattatgacggtaagatcagtaaaactatgtcaggactggaatgccaggcctgggattcacagtctccgcatgctcacgggtacattccatccaagttccccaataagaatctaaagaaaaattattgtcgcaaccctgatcgcgagctgaggccatggtgttttactaccgaccccaacaaaaggtgggaactttgcgatatacctagatgcacaactccccccccatccagcggaccaacctaccagtgtctgaaagggacaggtgaaaactaccgaggcaatgtcgcagtgaccgtttccggacacacatgccagcattggtcagcccaaaccccccacacccacaatcgaacccccgagaatttcccatgtaagaacctggatgaaaattactgcagaaaccccgatggaaaaagagcaccctggtgccatactactaacagtcaggtgcggtgggaatactgcaagatcccgtcctgtgattcaagccccgtcagcacagaacaactggcacccaccgcacctccggaactgacacccgtagttcaggattgctatcacggtgacggccagtcctaccgtgggacctcttcaactacgaccacaggaaagaaatgccagagctggtcttcaatgaccccccacaggcatcagaaaacccctgagaattaccccaacgcaggcctaacaatgaactactgccgcaatcctgacgcagataagggcccctggtgctttaccacggatcccagcgtccgatgggagtattgcaatctcaaaaagtgtagcggaactgaggcttctgtggttgctcctcctccggtcgttctgctgcccgatgtcgaaacaccatccgaagaagactgcatgtttggcaacgggaaagggtatcgcggcaagagagctacaaccgttaccggaactccgtgccaggactgggccgcacaggagccacataggcactcgattttcaccccagaaaccaatccaagagctggtctcgagaaaaactactgtcgtaatccagatggggacgtaggaggtccctggtgttatacaacaaaccctagaaagctgtatgattactgcgatgtgccccaatgtgctgctccgtccttcgactgtggaaaaccacaagtcgaacccaagaaatgtcctggtagggtcgtgggggggtgcgtggcacaccctcactcttggccctggcaggtgagtttgcgcacccgcttcggcatgcacttctgtgggggaacactgatcagcccggaatgggtactgaccgccgcgcactgccttgaaaagagtccccgaccttcctcttacaaagttattctcggggcccaccaggaggtgaatctggagcctcacgtccaggagatcgaagtcagcagactttttctagaaccaacgcggaaggatatcgccctgctgaaactcagctcccccgctgtcatcaccgataaggtgattcctgcatgcctcccttccccaaattacgtcgttgcagatcggactgagtgttttattaccggctggggagagactcaagggaccttcggcgctggactgttaaaggaagcacagctaccagttattgagaataaagtgtgcaatcggtatgaattccttaatggacgtgtccagagcacagagctatgcgccgggcatcttgccggcggtactgatagctgccagggggatagcgggggccctctggtgtgtttcgaaaaggataaatatattctgcagggcgtcacgtcttggggcctcggatgcgcaaggcctaacaaaccaggggtctatgtgcgagtgagccgcttcgtgacttggattgaaggagtcatgagaaataat

SEQ ID NO: 250911 - DNA, 2430 bp, synthetic construct
  misc_feature 1..2430: note = Description of Artificial Sequence: Synthetic coding sequence
  source 1..2430: mol_type = other DNA
atggaacacaaagaggtggtacttctgctcctgctgtttcttaagtcgggccaaggagaacctctggatgactacgtgaacactcagggcgcaagtctattttccgtgaccaaaaagcagctgggtgccggtagcattgaggagtgtgcagccaagtgtgaagaggacgaggagtttacatgtcgagccttccagtatcatagcaaggagcagcagtgcgttattatggcagagaatcgaaaatcttcaattatcatacgcatgagagatgtcgtccttttcgaaaaaaaagtgtacttgagcgagtgtaaaacaggtaatggcaaaaattatcgcggaactatgagcaaaactaagaacggtattacttgccagaagtggtcatctacaagcccacacaggcctagattctccccagccactcacccgagtgagggcctcgaggaaaattactgtaggaacccggataacgaccctcaagggccatggtgttatacaactgacccagagaaacgatacgactattgcgacattttggaatgcgaggaagaatgcatgcactgttcaggggagaactacgatgggaaaatttcaaaaaccatgagtggcctggaatgtcaggcttgggattcacaatcgccgcacgctcacggttatatacctagcaaattcccaaataagaacctaaagaagaattactgtcggaatcccgaccgggagcttcgcccttggtgtttcacaaccgatccaaacaagaggtgggaactatgtgacattccaaggtgtacaactccaccaccaagctctggacccacctatcagtgccttaaaggtacaggggagaattatagaggaaacgtagctgttaccgtctccggacacacttgccagcactggagcgcacagacgccccatacgcataacaggacccccgagaacttcccttgtaaaaatctggacgaaaattactgtcggaaccctgacggcaagcgggccccgtggtgccacacaacaaactcacaggttagatgggagtattgtaagatccccagctgtgattcctcacccgtgtccacagagcagctggcgccaaccgcgcccccagagctgacccctgtggtccaagactgttaccatggagacgggcagtcttacagggggaccagcagcaccactaccacaggaaagaagtgccaatcttggtcctctatgacgccacatcggcatcagaagacacccgaaaattatccaaatgcaggcctgaccatgaattactgtagaaaccccgacgcagataaggggccttggtgcttcactaccgatccgtctgtcagatgggaatactgcaatctgaaaaagtgtagtggcacagaagcgagcgttgtggcaccccctccagttgtactgctgcccgatgtggagacccccagcgaggaagactgtatgttcgggaatggcaaagggtatcgaggcaaaagagccactacggtgaccggcacaccatgccaagattgggccgcgcaggaaccccaccggcactcaatcttcacgcctgagactaacccaagggcaggtctggaaaagaattattgccggaacccagatggagacgtcggagggccttggtgttatacgacaaatccccggaagctgtatgactactgcgacgttccccagtgtgcggctccttcattcgactgcggtaagcctcaggtggagcctaagaagtgtcctggcagagtagtaggcggctgtgttgctcatccccacagctggccatggcaagtcagcctacgtactcgcttcgggatgcatttttgcgggggcacactcattagtcctgagtgggttctgacagctgcacattgcctcgagaaatcaccacggccaagttcctacaaggtgatccttggcgcacaccaggaagtcaatctggagcctcatgtacaagaaatcgaggtttcaaggctattcttggagcctactcggaaggatatcgcactgctgaagttgagctcccccgctgtgatcacagataaggtgatcccagcttgccttccgagcccaaactacgtggtggcagatcggacagagtgttttattactggatggggagaaacccaaggaaccttcggcgcggggttattgaaggaagcccagttgccggtgatcgaaaacaaggtctgcaatagatatgagtttctgaacggacgggtccagtcaaccgagctgtgtgcaggtcacctcgcaggcggaaccgattcctgccagggtgactccggtggcccactagtatgctttgaaaaggataagtacattctgcagggggtgacatcctggggcttaggctgcgcccgccctaataagccaggggtgtacgtcagggtcagccgcttcgtgacgtggattgaaggtgtgatgaggaataac

SEQ ID NO: 250912 - DNA, 2430 bp, synthetic construct
  misc_feature 1..2430: note = Description of Artificial Sequence: Synthetic coding sequence
  source 1..2430: mol_type = other DNA
atggagcacaaagaggtggtgctcctactccttctattcctaaaatcaggacagggggagccccttgacgattacgtcaatacacagggagcatcattattctcagtgacaaaaaaacagctaggagctgggtccatcgaagagtgtgctgccaaatgtgaagaagatgaagagttcacatgcagggcattccagtatcatagtaaggaacagcagtgcgtcataatggcagaaaaccgcaaatcttctattatcatccggatgagagatgtagtactctttgaaaaaaaggtttatctctctgaatgtaaaactggaaatggaaaaaactatcgggggacaatgtctaagacaaagaacgggatcacatgccaaaaatggtcatcaacatccccacatcggccacgattcagtcctgccacacacccatctgaaggattagaagaaaactactgccgaaatccagataatgaccctcaggggccatggtgttatacaacagatccagaaaaaagatatgattattgcgatattctggaatgcgaggaagaatgtatgcattgttctggggaaaactacgatgggaagatctctaaaacaatgtcagggctcgaatgccaggcctgggatagtcagtctccacacgcccacggatatattccttctaaattccctaataaaaatctgaagaagaactattgtagaaacccagatagggaattacgaccttggtgtttcacaactgatcctaacaaaaggtgggaactatgtgatatccccaggtgcactactccacccccttcttccgggcccacataccagtgtctaaaagggacaggagaaaattatagaggaaacgtcgcggtgactgtctctgggcatacatgccagcactggagtgctcagactccccatacacataatagaactcccgaaaattttccatgtaagaacctagatgaaaattattgccggaatcccgatgggaaaagggctccttggtgccatacaactaactcccaggtcaggtgggaatattgcaaaattccatcttgtgattcatctccagtgagtactgaacagttagcacccactgctcctcccgagctaactcctgtggtacaagattgttatcacggagatgggcagagttataggggaacttcttctacgactactacagggaaaaaatgtcagtcttggtcctccatgacaccacataggcaccagaaaacacccgagaactaccctaacgctggactaactatgaactactgccgcaaccctgatgccgataagggaccatggtgctttacaacagatccttctgtccggtgggagtattgtaatctcaaaaaatgcagtgggacagaagccagtgtggttgcaccccccccagtggttcttctacccgatgtcgaaactccaagtgaagaggactgtatgttcgggaatggaaaaggatataggggaaaacgagccacaacagtcactgggactccctgccaggattgggctgcacaggaaccccatcgacacagtatcttcactccagaaacaaacccccgggcaggacttgaaaaaaactattgtcgcaatcccgatggagatgttggaggaccatggtgttacacaacaaaccctagaaaattatatgattattgtgatgtgcctcagtgcgcagctccatccttcgattgtgggaaacctcaggtggaaccaaagaaatgtcctggaagagtagtcggaggatgcgtagcccacccccactcatggccatggcaggtctcgctcaggactagattcgggatgcatttttgtgggggaactctgatttcacctgaatgggtccttactgctgcacactgtctggaaaaatccccaaggccctccagttacaaggtgatcctaggggcccatcaggaagtaaatttagaaccacacgtccaggaaatcgaagtgtcacgcctgttcctagagcctactcgaaaagatatagccctcctgaaattgtcctcgccagctgtcatcacagacaaagtgatacccgcttgtttgccctccccaaactacgtcgtggccgatcggacagaatgctttatcacaggatggggagaaactcaggggacatttggagcagggctgctcaaagaggcacagttacctgtgatcgaaaacaaggtctgcaacaggtatgaattcctaaacgggagagtgcagtctactgaactctgtgcagggcacctggcgggagggactgattcttgtcaaggagattctggggggccactcgtctgtttcgagaaagataaatatatcttgcaaggagttacttcttggggattgggatgtgctcggcctaataaaccaggggtttatgtccgcgtatctcggtttgttacttggatagaaggggtaatgcgcaataac

SEQ ID NO: 250913 - DNA, 2430 bp, synthetic construct
  misc_feature 1..2430: note = Description of Artificial Sequence: Synthetic coding sequence
  source 1..2430: mol_type = other DNA
atggagcacaaggaagtggtgcttctcctgctattgtttctgaagagcggccagggagaacctctcgatgactacgttaacacacagggagcttctctgttttcggtcacaaaaaagcagctgggagcgggttctatcgaggaatgcgcagcaaaatgtgaggaggatgaggaatttacctgcagggccttccaatatcactcaaaggaacaacaatgcgtgattatggctgagaatagaaagagctcaatcatcatcagaatgcgtgacgttgtgctatttgaaaaaaaggtgtacctgtctgagtgcaaaacagggaacggcaagaactacagaggaactatgagcaaaaccaagaacgggattacttgtcagaagtggtcatcaacctctccgcacagaccaaggtttagtcctgccacccacccttctgaaggactcgaggagaactattgtcggaatccagacaacgatccgcagggaccctggtgttatacaaccgatccagagaagcgctatgattactgtgacattctggagtgtgaggaggagtgcatgcattgcagcggtgagaattatgatgggaaaattagtaaaactatgtcagggctggagtgtcaagcttgggacagccagagcccacacgcccatgggtacataccttcaaaattcccgaacaaaaacctgaagaaaaattattgcaggaacccagacagggaattgagaccttggtgctttacaaccgaccccaacaaacgatgggagctgtgtgacatcccccgctgcacaacaccaccgccttctagtggaccgacataccaatgcttgaaagggacaggcgaaaactacaggggcaacgttgctgtcactgtctccggacatacatgtcagcactggtccgcccagacccctcatactcataaccggacaccggagaacttcccatgcaaaaaccttgatgagaactattgccgaaacccagatggcaagagagcaccatggtgccacacaactaactcacaggtcagatgggaatattgtaaaattccatcatgcgatagcagccctgtgagcaccgaacaactagcaccaactgctccaccagaactgacacctgtcgtgcaggactgctatcatggagacggccaaagctatcgcggaaccagtagcaccacaacaacaggcaaaaagtgccaaagctggagtagtatgaccccgcaccgtcaccaaaagactcctgagaattaccctaatgccggattaaccatgaactactgcagaaacccagacgctgataaaggtccatggtgtttcacaacagaccctagcgtccggtgggagtactgcaatctcaagaagtgctccggcactgaggcctcggtggtggcccctccacctgtggtgttactcccagacgtggaaacaccgtcagaggaagactgcatgttcggtaacggcaagggatataggggaaaaagagcaacaacagtcaccgggaccccatgccaggattgggcagcccaggaaccccacaggcacagcatttttacccctgaaacaaacccacgagccggccttgagaagaactactgtcgtaacccagatggggacgttggagggccctggtgttatactaccaacccacggaaactgtacgactactgtgacgttcctcagtgcgccgccccgagcttcgattgcggaaaaccacaggtcgagccgaaaaaatgccctggaagagtcgtgggggggtgcgtcgcgcaccctcactcgtggccgtggcaagttagtttgcgcactagattcgggatgcatttttgtggaggcaccctgatcagcccagaatgggtacttaccgctgcccactgcctggagaagagcccccgcccttccagctataaagtgatcctgggtgcccatcaggaggtgaatctcgagcctcacgttcaagagattgaagtgtctcgactcttcctcgaacccacacgtaaagacatcgcactccttaagctttcttcaccagcggtcatcaccgacaaagttattcccgcatgtttgccatcccctaactatgtggtggctgatcggaccgagtgctttattacggggtggggagagacccaagggacttttggggctgggctgcttaaggaggcgcagctgcccgtgatcgagaataaggtgtgtaacagatacgagtttctgaacggaagggtgcagtcaacggaattatgcgccggacatttggctggaggcactgactcttgtcagggggatagtggcggcccactggtgtgtttcgagaaagacaagtatatcttgcaaggcgtcacatcctgggggctgggatgtgcgagacccaataaaccaggagtctatgtgagagttagcaggtttgtgacttggatcgaaggggttatgcgcaataac

SEQ ID NO: 250914 - DNA, 2430 bp, synthetic construct
  misc_feature 1..2430: note = Description of Artificial Sequence: Synthetic coding sequence
  source 1..2430: mol_type = other DNA
atggaacacaaggaagtcgtcctgctcctgcttctcttcctcaagagcggacaaggagaacctcttgacgattacgtgaacacccaaggcgcaagtctgttcagcgtgacgaagaagcaactgggcgccggatctattgaagaatgcgctgccaaatgcgaagaagatgaggagtttacgtgtcgggcatttcagtaccactcgaaggagcagcagtgcgtgatcatggccgagaatcgcaaatctagcatcatcatccgcatgagagacgtcgtgttgtttgagaagaaagtctacctcagcgagtgtaaaactggtaacggaaagaattacagaggcaccatgtccaaaactaagaacggtatcacttgccagaagtggagctcgacctcgcctcaccgtcctaggtttagccctgcaacccacccgtcggagggccttgaagagaactactgtagaaacccggacaatgatccgcaaggcccatggtgttacaccactgatcctgaaaaaaggtatgactattgtgatattctcgaatgcgaggaggaatgtatgcattgctcgggtgagaactacgatggaaaaatctccaagaccatgtcgggactggaatgccaggcctgggattcccagtccccgcacgctcacggatacattccgagcaagttcccgaacaagaatctgaagaaaaactactgccgaaacccggaccgagagctgcggccgtggtgctttaccactgatccgaacaagagatgggagctgtgcgacatccctagatgcactacgcccccgcctagtagcggcccgacctaccaatgcctgaagggaactggcgagaactaccggggtaacgtggccgtcaccgtctccggacacacctgccagcactggtcagcccagaccccacatacgcataaccggaccccagagaatttcccgtgcaaaaatctcgatgaaaactattgtcggaaccccgatgggaaaagggccccgtggtgccacaccacgaacagccaggtgaggtgggagtactgcaagatcccttcatgcgactcatcccccgtgtccaccgaacagctggcgcctaccgcaccgcccgagctgacccccgtggtccaggactgttaccacggagacggacaatcctacagaggaactagctcgactaccacgaccggcaaaaagtgccaatcgtggtcatctatgactccgcataggcatcaaaagactcctgaaaactacccgaacgcgggtctgacgatgaactactgccgcaacccagatgcggacaagggaccatggtgtttcactactgatccatcagtccgctgggaatactgcaatttgaagaagtgctcgggaacggaggcttccgtagtggctcctccgccggtggtgctcctcccagacgttgaaactccatcggaggaggactgcatgttcggaaatggtaaaggataccggggaaaacgcgcgaccaccgtcaccggaaccccatgccaggactgggcagcccaagaaccccatagacatagcattttcactcccgaaactaatccacgcgcgggtcttgaaaagaattactgtcggaatccggacggagacgtcggtggaccgtggtgctacaccacgaatccacgcaagctgtacgactactgtgacgtgccacagtgcgctgcaccttcattcgattgtggtaagccccaagtagagcctaagaagtgtccaggacgggttgtcgggggctgtgtcgcgcatccacatagttggccttggcaagtgtcgttgcggacccgcttcggcatgcacttctgcggaggaaccctgatctcgccagaatgggtgcttaccgccgcgcattgcctggaaaaaagtccgcgcccgagctcatataaggtgatcctgggagctcaccaggaagtgaacctggaaccccacgtccaagaaatagaggtgtccagactcttcttggaacccactcgaaaagatatcgcgctcctcaagctgtcatcgccagcagtcatcaccgacaaggtcatcccggcgtgcctccccagccccaactacgtggtggccgacaggactgagtgctttatcaccggatggggcgaaactcagggcaccttcggtgcggggctcctgaaggaagcccagcttccggtgatcgagaataaagtgtgcaatcggtacgagtttttgaacgggcgcgtgcagtccactgaactgtgcgccggacatctcgccggaggaactgactcttgccagggagactccgggggaccactggtgtgcttcgagaaggacaagtatattcttcagggggtcacctcctgggggctgggctgcgctcggccgaataagccgggagtctacgtgcgcgtatcgaggttcgtcacttggatcgagggcgtgatgcggaataac

SEQ ID NO: 250915 - DNA, 2430 bp, synthetic construct
  misc_feature 1..2430: note = Description of Artificial Sequence: Synthetic coding sequence
  source 1..2430: mol_type = other DNA
atggagcacaaagaggtggtcctgctgctgctattatttctgaagtctgggcagggcgagcctttggatgactacgtgaacacacagggcgctagcttgttctcagtgacaaagaagcaacttggggctgggtcgatcgaggaatgcgccgctaagtgtgaggaggatgaagaattcacctgccgggctttccaataccacagcaaagagcaacagtgcgtaatcatggcggagaatagaaaaagctctatcattatccggatgcgggatgtggtgctgttcgagaagaaagtgtacctcagcgagtgtaagacaggaaatgggaagaactaccgcggaactatgagcaaaaccaagaacggaatcacttgtcagaagtggtcttcaacgagtccccatcgaccccggttcagtccggcaactcacccgagtgaggggctcgaggagaactattgcaggaatcctgacaacgatcctcaggggccctggtgctatacgaccgaccctgaaaaaaggtatgactactgcgatatactagagtgtgaggaggaatgtatgcattgctctggagagaactacgacggcaagattagcaaaaccatgagcggactcgaatgccaggcgtgggatagccagtccccccatgctcacggttacattccgtccaagtttcctaataaaaacctgaagaagaactactgcagaaaccccgatcgcgaactgagaccctggtgctttactaccgatcccaataagaggtgggaactgtgtgacattccgcgttgtaccacacccccaccttcctccggacccacttaccagtgtttgaaaggcacaggggaaaactacagggggaacgtcgctgtcactgtgagcggccatacctgccagcactggtcggcccagacgccccatacccataacagaaccccagagaatttcccgtgcaagaacttagatgagaattactgccgtaatcctgacgggaagcgggccccttggtgccacaccacaaacagccaagtgcgttgggagtactgcaagattcccagttgcgattcttcacctgtctctaccgaacagcttgccccaacagctccgcccgagctgacccccgtcgtgcaggactgctatcatggcgacggacagagttaccggggaacgtcatcaactacaaccaccggcaagaagtgccagtcctggtcatccatgaccccgcacaggcaccagaaaactcccgaaaattacccgaatgccggccttaccatgaattattgtcgcaatcccgacgccgataaaggaccctggtgtttcaccacagatccatctgtccgatgggagtactgcaacctgaagaagtgtagtggaaccgaagcctcggtggtggctccccctccagtcgtgctgctccccgacgtggagaccccaagcgaggaagactgcatgttcggcaacggcaagggttacaggggaaaacgggcgactaccgtaacaggcacaccctgtcaggattgggcggcccaggagccccatcggcacagtatcttcacgccagagacaaatcctcgtgccggtctagagaagaactattgcaggaaccccgacggagacgttggcggaccctggtgctacacaaccaacccccggaagctgtatgattactgtgatgtgccgcagtgcgccgcacctagcttcgattgtggaaaacctcaagtggagcccaagaaatgtccagggcgggttgtgggaggctgtgtcgcgcacccccactcctggccctggcaggtgtctttacgtacaagattcgggatgcacttctgcggaggcaccctgatcagccccgaatgggttctgaccgctgcgcactgcctggagaagagccctcgcccgtcgtcatataaagtgattcttggggcacatcaggaggtgaatttggagccccatgtccaggaaattgaagttagtaggctgttcctggaaccaacccgcaaggatatcgcactgctgaaactcagctcgcccgccgtaatcaccgacaaggtcatacccgcctgtctgccatctccaaattatgtggtggccgataggacagagtgcttcatcacggggtggggcgaaacccagggcacttttggcgccggcctgctcaaagaggctcagctccctgtgatcgaaaataaagtctgtaacagatatgagttcttgaacggcagggtacagagcaccgagctgtgtgccggacacctggccggcggcactgacagttgccaaggcgattccggaggccccctggtttgttttgagaaggacaaatacatcctgcagggggttacaagctggggcttggggtgcgccaggccgaacaagcctggcgtttatgtgagggtgagccggtttgtgacttggatcgaaggagtcatgcgcaacaat

SEQ ID NO: 250916 - DNA, 2430 bp, synthetic construct
  misc_feature 1..2430: note = Description of Artificial Sequence: Synthetic coding sequence
  source 1..2430: mol_type = other DNA
atggaacacaaggaggtagtcctgctgctgttactcttcctcaagagcggacagggagaacctctggatgactatgtgaatactcagggcgcaagcctcttctccgtcacaaagaagcaactcggcgcaggtagtattgaggagtgtgctgcaaaatgcgaggaggacgaagagtttacttgtcgcgcatttcagtatcatagcaaggagcagcagtgcgtgataatggccgaaaatcggaagtcatctattatcataagaatgcgggatgtcgtactattcgagaaaaaagtctacttgagcgaatgcaagaccggtaatggtaagaattatcggggtacaatgagtaaaaccaagaacggcatcacgtgccagaagtggtccagtacttccccccaccgccctcggttcagtcctgcgacacacccctccgaaggactcgaggagaactactgccggaatcctgacaatgacccacaaggcccctggtgctacactaccgatccggagaagcgctacgattattgtgatattttggaatgtgaggaagagtgtatgcactgctctggagaaaattacgatggaaagatttctaagaccatgagtgggctcgagtgccaggcctgggacagccagtcacctcatgcccatgggtatattccgtctaaatttccaaacaagaacctcaagaagaattactgcagaaaccctgacagagagctgcggccctggtgcttcacgaccgatccgaacaagaggtgggagctctgcgatattccgcggtgtactacgccacccccttcctccggccctacttatcagtgtctcaaggggaccggggagaactacaggggaaatgtggcggttactgtctccggtcacacttgtcagcactggagcgctcagacaccacacacccataaccgcacccccgaaaattttccatgcaagaacctggatgagaactattgcagaaacccagacggaaaacgcgcaccatggtgccacactacaaactctcaagtgagatgggaatattgtaagataccatcctgtgactcttcacccgtttctaccgaacagctcgcccctactgcccctcctgagttgacacccgttgtgcaggactgttaccatggtgacggtcagtcttacagggggacctcttctactaccaccaccggcaaaaagtgtcagagctggtccagcatgaccccccatcgtcatcaaaagacacccgagaattaccccaacgccggtttaacaatgaattattgcaggaaccctgacgccgataagggtccttggtgttttactactgatccaagcgtacgctgggaatattgcaacctcaagaaatgttctggaaccgaggcgagcgtagttgcccctcctccagtagtacttcttcctgatgtcgaaaccccttccgaggaggactgcatgtttggtaacgggaagggatatcgcggtaaaagagccactacagtgacgggcactccatgccaggactgggccgcacaagagccccatcgacacagtatcttcacccccgagacaaacccgagggcaggattggaaaagaactactgccggaaccccgatggggacgtggggggcccatggtgctacaccacaaaccctaggaaactctatgattattgcgacgtaccccaatgcgccgcgcccagcttcgattgcggaaagccacaagtcgaacccaaaaaatgtcctgggcgggttgtgggaggctgtgttgctcatccacactcttggccgtggcaggttagccttagaacacggttcggcatgcacttttgtggcgggactctgattagtcccgaatgggtactgacggctgctcactgtctggagaagagtccaaggcctagctcctacaaggtgattctgggggctcatcaggaggtaaacctcgagccacacgtgcaagagatagaggtgtctaggcttttccttgagccaacaaggaaggacatcgcccttctcaagctttcttctcctgccgtgattactgacaaggttatcccagcttgtctaccatcgccgaactacgtggtagccgatcgtactgagtgttttatcactggatggggcgagacccaaggcacattcggcgccgggctcctgaaagaagcccagctccccgtgatcgagaataaggtgtgcaatcggtacgagtttctgaacgggagggttcagtcaactgaactgtgtgccggacatcttgcaggtggcaccgattcttgccagggagacagcggcgggccactggtgtgcttcgagaaagacaagtacatcctccagggggtgaccagctggggactggggtgtgcacgtcctaataagcccggcgtttatgtgagagtgtctcggtttgtgacttggattgaaggcgttatgcgaaataat

SEQ ID NO: 250917 - DNA, 2430 bp, synthetic construct
  misc_feature 1..2430: note = Description of Artificial Sequence: Synthetic coding sequence
  source 1..2430: mol_type = other DNA
atggaacataaagaagtagtattactactactattatttttaaaatcgggtcaaggtgaaccgttagatgattatgtaaatacgcaaggtgcgtcgttattttcggtaacgaaaaaacaactaggtgcgggttcgatagaagaatgtgcggcgaaatgtgaagaagatgaagaatttacgtgtcgtgcgtttcaatatcattcgaaagaacaacaatgtgttataatggcggaaaatcgtaaatcgtcgataataatacgaatgcgtgatgttgtactatttgaaaaaaaagtatatttatcggaatgtaaaacgggtaatggtaaaaattatcgaggtacgatgtcgaaaacgaaaaatggtataacgtgtcaaaaatggtcgtcgacgtcgccgcatcgtccgcgattttcgccggcgacgcatccgtcggaaggtttagaagaaaattattgtcgaaatccggataatgatccgcaaggtccgtggtgttatacgacggatccggaaaaacgttatgattattgtgatatattagaatgtgaagaagaatgtatgcattgttcgggtgaaaattatgatggtaaaatatcgaaaacgatgtcgggtttagaatgtcaagcgtgggattcgcaatcgccgcatgcgcatggttatataccgtcgaaatttccgaataaaaatttaaaaaaaaattattgtcgtaatccggatcgtgaattacgtccgtggtgttttacgacggatccgaataaacgttgggaactatgtgatataccgcgttgtacgacgccgccgccgtcgtcgggtccgacgtatcaatgtttaaaaggtacgggtgaaaattatcgaggtaatgttgcggttacggtatcgggtcatacgtgtcaacattggtcggcgcaaacgccgcatacgcataatcgtacgccggaaaattttccgtgtaaaaatctagatgaaaattattgtcgtaatccggatggtaaacgtgcgccgtggtgtcatacgacgaattcgcaagttcgttgggaatattgtaaaataccgtcgtgtgattcgtcgccggtttcgacggaacaactagcgccgacggcgccgccggaattaacgccggtagtacaagattgttatcatggtgatggtcaatcgtatcgaggtacgtcgtcgacgacgacgacgggtaaaaaatgtcaatcgtggtcgtcgatgacgccgcatcgacatcaaaaaacgccggaaaattatccgaatgcgggtttaacgatgaattattgtcgaaatccggatgcggataaaggtccgtggtgttttacgacggatccgtcggttcgatgggaatattgtaatctaaaaaaatgttcgggtacggaagcgtcggttgttgcgccgccgccggtagttttattaccggatgttgaaacgccgtcggaagaagattgtatgtttggtaatggtaaaggttatcgtggtaaacgtgcgacgacggttacgggtacgccgtgtcaagattgggcggcgcaagaaccgcatcgtcattcgatatttacgccggaaacgaatccgcgagcgggtttagaaaaaaattattgtcgaaatccggatggtgatgtaggtggtccgtggtgttatacgacgaatccgcgtaaactatatgattattgtgatgtaccgcaatgtgcggcgccgtcgtttgattgtggtaaaccgcaagtagaaccgaaaaaatgtccgggtcgtgttgtaggtggttgtgtagcgcatccgcattcgtggccgtggcaagtatcgttacgtacgcgatttggtatgcatttttgtggtggtacgttaatatcgccggaatgggtactaacggcggcgcattgtttagaaaaatcgccgcgaccgtcgtcgtataaagttatactaggtgcgcatcaagaagttaatttagaaccgcatgtacaagaaatagaagtatcgcgtctatttttagaaccgacgcgtaaagatatagcgttattaaaattatcgtcgccggcggtaataacggataaagtaataccggcgtgtctaccgtcgccgaattatgtagtagcggatcgtacggaatgttttataacgggttggggtgaaacgcaaggtacgtttggtgcgggtttattaaaagaagcgcaattaccggttatagaaaataaagtttgtaatcgttatgaatttctaaatggtcgtgtacaatcgacggaactatgtgcgggtcatctagcgggtggtacggattcgtgtcaaggtgattcgggtggtccgttagtatgttttgaaaaagataaatatatactacaaggtgtaacgtcgtggggtttaggttgtgcgcgaccgaataaaccgggtgtttatgttcgagtatcgcgttttgttacgtggatagaaggtgtaatgcgaaataat

SEQ ID NO: 250918 - DNA, 2430 bp, synthetic construct
  misc_feature 1..2430: note = Description of Artificial Sequence: Synthetic coding sequence
  source 1..2430: mol_type = other DNA
atggaacacaaggaggtcgtgctgctgttgttgctttttctgaagagtgggcaaggcgagccgctggacgattatgttaacactcaaggcgcaagtcttttctctgtgactaaaaaacagttgggggcggggagcatagaagaatgcgcagccaaatgtgaggaggatgaggagttcacttgtcgcgcctttcaataccactctaaggaacaacagtgcgtgattatggctgaaaataggaagagctcgataatcattcgtatgagagacgtggtgctgtttgagaagaaggtctatctttccgaatgtaagacaggaaatggcaagaattacagggggaccatgtcaaagactaagaacggaattacgtgtcagaaatggtcctctacatcccctcaccgcccccggttctcacctgcaactcatcctagtgagggactagaagagaattattgcagaaatccagataacgatcctcagggaccttggtgttataccaccgatccagagaagcggtatgattactgcgacattcttgaatgcgaggaggaatgtatgcactgttccggagagaattacgacggcaagatttccaaaaccatgtccggtcttgagtgccaggcctgggactcccagagtccgcacgcccacggttatattccttccaaatttcccaacaagaatttgaaaaagaattattgtaggaatccagaccgggaactcagaccttggtgctttacaacagaccccaataagcggtgggagctgtgtgatattcctagatgcacgactcccccacccagttccggacctacatatcagtgtctaaaaggaacaggggagaattatcgggggaacgtcgcggtcaccgtaagcggtcacacgtgccagcactggagtgcgcagacaccacatacccacaacaggaccccggaaaatttcccctgtaaaaatttagatgagaactattgcaggaatcccgacggcaagcgggctccctggtgccacacgaccaactcacaagtcagatgggagtactgcaaaattcccagctgcgactcttcaccagtgtccaccgagcagctcgccccaacagcccccccggaacttacgccagtcgtgcaggactgctatcacggggatggccagagttatcgtggtacctcaagcacgaccactacaggaaagaaatgtcagagctggtcctccatgacaccccaccgtcatcaaaagactcccgagaattaccctaatgccggcctcacaatgaattactgtcggaaccccgacgcagataagggaccatggtgtttcactacggacccttctgtcagatgggagtactgcaatctgaagaaatgcagcggaactgaggcctctgtcgtagcaccccctcccgtggtattgctgccagatgtagagacaccatctgaagaagactgcatgttcggtaatgggaaggggtacaggggcaagcgggcgaccactgttaccggtaccccgtgtcaggattgggctgcccaggagcctcatcgccactctatcttcacgcccgaaactaaccctcgagcgggcctcgaaaaaaactattgcagaaacccagatggagacgtgggcggaccatggtgctatacaaccaatccacgcaaattatacgattactgtgatgtcccacagtgtgcagccccttctttcgactgtggtaaaccccaggtggagcccaaaaaatgcccagggcgcgtcgtgggagggtgcgtggctcacccccactcttggccctggcaagtgtctctgcgcacccggtttgggatgcatttttgtggtggaaccctaatttcgccagagtgggtcttgaccgccgcacactgtttggagaagagccctcggccctcctcctataaggttatcttgggcgcacaccaagaagtcaacctggagccccatgttcaagaaatcgaggtcagccgactgttcctcgaacctacccgtaaggacatagccttgctcaagctctcctcaccagccgtgattactgacaaggtgataccggcatgcctgccatccccaaactacgtggtggccgaccgcacagaatgcttcatcacgggatggggcgagacgcaaggtacattcggcgccggactgctgaaagaagcacaactcccagttatagaaaataaggtgtgtaacaggtacgaatttctcaacggcagagtgcaatctaccgaactttgcgccggccatcttgcaggcggaacggattcttgccaaggcgattcagggggaccgctcgtgtgtttcgagaaggataaatacatcctgcagggcgtaaccagctggggtctagggtgcgcccgccctaacaagcctggggtgtacgtgcgggtgagcagatttgtgacctggatcgaaggtgtaatgagaaacaac

SEQ ID NO: 250919 - DNA, 2430 bp, synthetic construct
  misc_feature 1..2430: note = Description of Artificial Sequence: Synthetic coding sequence
  source 1..2430: mol_type = other DNA
atggaacacaaggaggtcgtgctcctgcttcttctgttcctgaaatctggtcaaggggaacctctggatgattacgtgaacacccagggcgcgtccttgttttcagtgaccaaaaagcagctcggagcggggtcgatcgaagaatgcgcggcaaagtgtgaggaagatgaagagtttacttgccgtgcgtttcaataccatagcaaggagcaacagtgcgtgattatggcagagaaccgtaagagtagcatcattatccggatgcgagacgtcgtgctctttgaaaagaaagtgtacctgagcgagtgcaagaccggtaacgggaagaactaccggggaaccatgtctaagaccaagaacgggataacttgtcaaaaatggagctcaacttcccctcatcgtcccagattttcgccggctacgcacccatccgagggcctggaggagaactactgtcgtaacccggataacgaccctcaagggccctggtgttacactactgacccagagaagagatacgattattgtgacatattggaatgtgaagaagaatgtatgcattgttcaggtgagaattacgatgggaagatctcgaaaaccatgagcggtttggaatgtcaagcatgggactcacagagcccacatgcacacggatacattccatcaaaattcccaaacaagaatctcaagaagaactattgccggaaccccgatcgggagctcaggccttggtgttttactactgacccgaataagagatgggaactgtgcgatataccgcgctgtacgacccctccaccatccagcggccctacctaccaatgccttaagggcactggcgaaaactaccgcggcaatgtggctgtgaccgtcagcggacacacttgtcaacactggagtgcccagacccctcatactcataatagaacccctgaaaactttccgtgtaagaacctggatgaaaactactgcagaaaccctgatggaaaaagggctccatggtgccatacgaccaacagccaggtgagatgggaatattgcaagataccgtcgtgcgattcgtcgcctgtgtccaccgaacagcttgcaccgactgctccaccagaactgacccctgtggtgcaggattgctaccatggagacggacagtcctaccggggcacttcgtccactactactacgggaaagaagtgtcaatcgtggtcctcaatgactccacaccgacaccaaaagacccccgagaactaccccaatgcaggacttaccatgaattactgtcgcaaccctgacgcggataagggtccgtggtgcttcactacggacccttcggtcagatgggagtactgtaatctgaagaaatgttccggcactgaagcctcggtggtcgctccgcccccggtcgtgcttcttcccgatgtggaaaccccatcggaggaggattgtatgtttggaaacggaaagggttatcgcggtaagcgagccaccactgtgactggtactccttgtcaggattgggcagcacaggagcctcataggcattccattttcactcctgaaaccaacccacgcgccggacttgagaagaattactgcaggaatccagatggtgatgtgggtggcccttggtgctacaccaccaatcctaggaagctgtacgactactgcgacgtgccacaatgtgcagcgccatccttcgattgtggtaagccacaggtggagcccaagaagtgtcccggtagggttgtcggagggtgtgtggctcatccccattcgtggccttggcaagtctcccttagaactcgatttggtatgcacttttgtggaggaactctcatttcaccagagtgggtcctgaccgcagcacactgtctggaaaagagccccagaccctcaagctataaagtcatcctgggcgcccatcaagaggtgaacctcgaaccacacgtgcaagagattgaagtctcccggctctttctggaacccactcgcaaggacatcgcacttctcaaactgagctcgccagcagtgattactgataaggtgattcccgcatgtctcccttcccctaactacgtggtggcagatcgaaccgagtgtttcataaccggatggggtgaaacccaaggcacgtttggtgccggactcctgaaagaggcccaattgccagtcattgagaataaagtgtgcaaccgctacgagtttcttaacggtcgggtgcaatcaacggaactgtgtgcaggccatcttgcaggtggtaccgactcctgtcagggggactccggaggtcccctggtgtgctttgaaaaggataagtacatcctccagggagtgacctcgtggggtttgggatgtgcacgacccaacaaacctggagtgtacgtgagagtgtcccgctttgtgacttggatcgaaggagtgatgagaaacaac

SEQ ID NO: 250920 - DNA, 2430 bp, synthetic construct
  misc_feature 1..2430: note = Description of Artificial Sequence: Synthetic coding sequence
  source 1..2430: mol_type = other DNA
atggagcataaggaagtagtgctgttgctcttgctcttcctaaagtcaggacagggcgaacctctcgatgactacgtcaatacccagggagcttccctgttctctgttactaagaagcaattaggagccggctctattgaagaatgcgccgctaagtgtgaagaagacgaagagttcacttgcagggccttccaataccactccaaggaacagcagtgcgtgatcatggcggagaaccgaaagagcagcattatcatccgtatgcgcgatgtggtgctcttcgaaaagaaagtttacttgtcggaatgcaagaccggtaacgggaagaattaccgcggaacaatgtcaaagacgaaaaatgggatcacctgccagaagtggtcatcgactagcccacatcgacccaggtttagcccagcaacccatccctcggagggcctggaggagaactattgccgtaatccagacaacgacccgcagggtccctggtgttatacaaccgatcctgagaaacgctacgattattgcgacattctggagtgcgaagaagaatgtatgcactgctcgggcgaaaactacgacggtaagattagcaagactatgagtggactggagtgtcaggcttgggactcacagtctcctcatgctcatggctacattcctagtaagttccccaataaaaacctgaaaaagaactattgcagaaaccctgaccgggagctccgcccttggtgcttcacgacagaccctaataaacggtgggaactctgcgatattccacgatgtacaactccgccgccctcctccggaccaacttaccaatgtctgaaagggaccggcgaaaactatagaggtaacgttgctgttacagtgtccgggcacacgtgccagcactggtcagcccagactccgcatacacataaccggacacccgagaatttcccgtgtaaaaatcttgacgagaattactgtagaaatccagacgggaaacgggcaccatggtgccacacaaccaactcccaggtacgttgggagtattgtaaaatcccaagctgtgactcctcaccagtgtcaacagaacagttggcacccactgccccccctgaattaacacccgtggtccaggattgctaccacggcgacgggcaatcctacaggggaacaagctcaacgaccacgaccggtaaaaagtgtcaaagctggtcatccatgacaccgcaccgacatcagaaaacgccagagaattaccctaacgctggcctaacgatgaattactgtagaaacccagatgctgataagggcccctggtgtttcaccacagatccatcagttagatgggaatactgtaatctgaagaagtgcagcgggaccgaagcttcagtagtggcaccgccacctgtcgtgcttctccctgacgtcgagacaccgtcagaggaagactgtatgttcgggaatggaaaaggctaccggggcaaaagagccaccacggtgactggcaccccgtgtcaagattgggccgcccaggagcctcacagacatagcatctttactcccgagaccaatcccagagccgggttggagaagaactactgtcggaaccctgacggcgatgttgggggcccgtggtgctataccaccaacccacgaaagttatatgactattgtgatgtcccccaatgtgcggccccctcgttcgattgtggtaagccgcaggtggaacccaagaagtgtccaggacgggtggtggggggatgcgtcgctcacccacatagctggccatggcaggtgtccttaaggacacgctttggcatgcacttctgtggaggtactctgatctcccctgagtgggttcttacagctgcccactgcctagaaaaatcgcccaggccttcctcttacaaggtgattttgggcgcccaccaggaggtgaacctggaaccccacgtccaagaaatcgaagtatctcgcctctttctggagcccactcgaaaagacatcgctctcctgaaactgagctctcctgcggtgatcacggacaaggttattcccgcttgcttgcctagccctaactacgttgtcgctgacagaactgaatgcttcatcaccggatggggggagacccaaggtaccttcggagcaggtttgctgaaggaagcgcagcttcctgtgatagagaataaagtatgtaacagatatgaattcttgaacggccgggtgcagtccactgagctctgtgctggacacttagccgggggcacagactcttgtcaaggcgattctggtgggcccttggtgtgtttcgaaaaagacaagtatattctccagggagtaacctcctgggggctgggatgtgcccgacccaacaagcctggggtgtatgtccgagtctctagattcgttacatggattgagggtgtaatgcgtaacaat

SEQ ID NO: 250921 - DNA, 2430 bp, synthetic construct
  misc_feature 1..2430: note = Description of Artificial Sequence: Synthetic coding sequence
  source 1..2430: mol_type = other DNA
atggagcacaaagaagtggtgctgctgctcctgctgtttctgaagagcggacaaggtgaaccgctggatgactacgtgaatacccagggggcctcgctgttttccgtgactaagaagcagttgggggcgggatcaatcgaggaatgtgcagccaagtgcgaggaagatgaagagttcacctgccgcgcgttccaataccactccaaagagcagcagtgcgtgatcatggcggagaacagaaaatcctcaataatcatcaggatgcgggatgtggtgctgttcgagaagaaggtgtacctgagcgagtgcaagacggggaatggaaaaaactatcgcggaactatgtcgaaaaccaaaaacggaatcacctgccagaagtggtccagcacttcgccacatcgcccacgcttcagcccagctactcacccatcagaagggctcgaggagaattactgcaggaatccagacaacgatccacagggtccttggtgctatactactgatccggaaaagcgctacgattactgtgacatcctcgaatgcgaagaggagtgtatgcattgctccggagaaaactacgacggaaagatcagcaagacgatgtccggcctcgaatgccaggcatgggactcgcagtcgccacacgcacacggatacatcccgtccaagttcccaaacaaaaaccttaagaagaactactgcagaaacccggatcgcgaactgcgcccctggtgttttaccaccgatccaaacaagcgctgggagctgtgcgatatcccccggtgtactacccctcccccttcctccggacctacttaccaatgcctgaaagggactggagagaattaccgtggcaatgtggcggtcactgtgtccggccacacttgtcaacactggtcagctcagacccctcatactcataataggaccccggaaaacttcccgtgcaaaaatctggacgaaaactactgccgcaaccccgacggaaagcgcgcgccatggtgccacaccactaattcgcaggtgcgctgggaatactgcaagatccccagctgcgattcttcgccagtgtcgaccgagcagcttgcgcctactgccccgcctgaactgactccggtcgtccaagactgctatcacggagacggacagagctaccgcggaacttcgtcaaccacgaccaccggaaagaagtgccagagctggtcctccatgactccgcatcggcaccaaaagacccctgagaactaccctaacgcaggattgaccatgaactactgccgtaatccggatgccgataagggaccgtggtgctttaccaccgacccatccgtgcgctgggagtactgcaacctcaagaagtgctccggaacggaggcatcggtcgtggcaccgccgccggtcgtgctgctgccggacgttgagacgccatcggaagaggattgtatgttcggtaacggaaagggataccgcggcaaacgagcaactactgtcactggcactccgtgtcaggactgggccgctcaggagccgcaccgccactccatcttcacccctgaaaccaacccccgcgctggactggaaaagaactattgtcggaatcccgacggagatgtgggaggcccgtggtgctatacgactaacccgagaaagctgtacgactactgcgacgtgccgcaatgtgcggctccttcgtttgattgcggtaagccgcaggtggagccgaaaaagtgtcctgggcgggtggtggggggctgcgtcgcccaccctcactcctggccgtggcaagtgtcccttagaacgaggttcggaatgcatttctgtggaggaaccctgatcagccctgaatgggtgctgaccgcggcacactgcctggagaagtcacctagaccttccagctacaaagtgatcctgggagctcatcaagaggtcaacctcgagccgcatgtgcaggaaatcgaagtgtcccgcctcttcctcgaaccaactcggaaggacatcgccttgctgaagctgtcgtcgccggcggtgatcactgacaaggtgatcccggcttgcctccctagccctaattacgtggtcgccgacagaactgagtgctttatcactggctggggcgaaactcaaggaactttcggagcggggctgcttaaagaagcacaattgccagtgattgagaataaagtgtgtaatcgctacgaattcctgaatgggagagtccaatctactgaactgtgcgcaggccatctcgcgggaggcaccgacagctgccaaggagatagcggaggtccactcgtctgctttgaaaaggacaagtatattctccaaggagtgacttcgtggggtctgggatgcgcacgcccgaataagcctggggtctacgtccgcgtctccagattcgttacttggatcgaaggcgtgatgaggaataac

SEQ ID NO: 250922 - DNA, 2430 bp, synthetic construct
  misc_feature 1..2430: note = Description of Artificial Sequence: Synthetic coding sequence
  source 1..2430: mol_type = other DNA
atggagcacaaggaagtggtcctgctgctgctattattcctgaagtctgggcagggcgaacctctggacgactacgtgaatacccagggcgcctctctgtttagtgttacaaaaaagcagctgggggctggtagcatagaggagtgcgctgccaagtgtgaggaggacgaggagtttacatgtcgcgcattccagtaccactccaaggagcagcaatgcgtcatcatggctgaaaatcggaagtccagtatcatcatacgcatgcgcgatgtggttttgttcgagaagaaagtatatctgtcagagtgcaagaccggaaatggcaaaaactaccggggcaccatgtcaaagactaagaacgggatcacctgccagaaatggagtagcacatcacctcatcggccccggttctcgcccgcaactcaccccagtgagggactcgaggagaattactgtaggaaccccgataacgacccgcaggggccttggtgttatacgacagatcctgagaaacggtatgattattgcgatattcttgagtgcgaggaggagtgtatgcactgctctggagagaactacgacggaaaaattagcaaaacgatgagtggattggaatgtcaggcttgggacagccagtccccccatgcacatggttacatcccctcaaaattccctaataaaaatctgaaaaaaaactactgtcgtaacccggatagggagctgcgaccgtggtgtttcacgacggaccccaataaaaggtgggagctctgcgacatcccccggtgtactacaccgcctcctagctcagggcccacataccagtgtttgaaaggcaccggggagaattaccgaggcaatgtggcggtgacagtgagcggccatacatgccagcattggagtgcacagaccccccacactcacaaccgaacacccgaaaatttcccctgtaaaaatctcgatgagaattattgccggaatcctgatggcaagagagctccttggtgtcataccaccaattcacaggtccgttgggaatattgcaagataccctcttgtgattcttcaccagtctccaccgaacagctggcacccaccgccccccccgagctcacgcccgtggtccaagattgctatcatggagacggccagagttaccgtggcacaagtagcacaacaaccacgggaaagaagtgtcagagctggagcagtatgaccccacaccgccatcaaaagactcctgagaactacccaaacgccggcctaactatgaattactgtagaaaccctgatgctgataagggcccttggtgtttcaccaccgatccatctgtgcgctgggaatactgcaatctgaaaaaatgctctggtacagaagcaagcgtagtggctccgcctcctgtggtactactacctgacgtggaaaccccatcggaagaggactgcatgttcggcaatggaaagggctatcggggcaagagggcaactaccgtgaccgggactccctgtcaggactgggcggctcaggagccacacaggcatagtatcttcacccctgagaccaaccctcgtgcgggtctggagaaaaactattgcaggaatcctgacggcgatgtagggggcccgtggtgctatactacaaaccctcgaaaactttatgattactgtgatgtgccccagtgcgcagccccatcattcgattgtggaaagccacaggtcgaacccaaaaaatgtccaggaagggtagtaggtggttgcgttgcccatccccactcctggccttggcaagtgtccctgcggaccagatttgggatgcatttctgtggagggacgttgatcagtcctgagtgggtcctgaccgctgcacactgtttggagaagtctccgaggcctagttcatacaaggtgatccttggcgcccaccaggaagttaaccttgagccccacgtgcaagagatcgaagtcagccgccttttcctggaaccaactaggaaggatatcgccttgctcaaactgtcatccccagcagtcattactgacaaggtgataccagcttgcctgccttctcctaattacgtggtagctgacagaactgaatgtttcatcaccggctggggagagacccaaggtaccttcggcgctggcttgctcaaagaggcccagctacctgtaattgaaaataaggtatgcaacaggtacgaatttctgaacggcagggttcagtcaactgagttatgcgcaggacatcttgctgggggcacggatagctgccagggtgatagcggggggccactcgtttgcttcgagaaggataagtatatcttgcagggcgttacaagctgggggctcggatgcgcccgccctaacaagcccggcgtgtatgtgcgggtgagcaggtttgtgacgtggatagagggggtcatgcgaaacaat

SEQ ID NO: 250923 - DNA, 2430 bp, synthetic construct
  misc_feature 1..2430: note = Description of Artificial Sequence: Synthetic coding sequence
  source 1..2430: mol_type = other DNA
atggagcacaaggaggtggtgctcctgttgcttctgtttttgaaatcaggacagggtgaacctctcgacgattacgtgaacacacagggagcctcactcttttcagtgaccaaaaagcagctcggtgccgggtctattgaagaatgcgccgcaaagtgcgaagaagatgaggagttcacttgtcgggcctttcaatatcattccaaggaacagcagtgcgtgatcatggccgagaatcggaagagcagtatcatcatcagaatgcgggatgttgtgctgttcgagaagaaggtttatctttctgaatgtaagaccggaaatggaaagaattacaggggcacaatgtctaaaaccaagaacggaattacgtgtcagaagtggagctctaccagccctcacagacccaggtttagccccgccactcacccctcagagggcttggaggagaactactgtagaaacccagataatgacccccagggcccatggtgttacacaaccgacccggagaaacgctacgactactgtgacattctggagtgcgaagaagagtgcatgcattgctcaggcgagaattatgacggaaagattagcaaaaccatgtccggcctggagtgtcaggcatgggattcccaatctccccatgctcacggctatatcccatccaagtttcctaataaaaatctgaagaaaaactattgtagaaaccccgacagagaactgagaccttggtgtttcacaaccgaccctaacaagcgatgggagctgtgtgacatcccaagatgcacaactcccccccctagttccggccccacatatcaatgcctcaagggtaccggagaaaattaccgggggaacgttgcagtcacagtgagtggacacacctgtcaacattggagtgcacaaacaccgcatactcacaatcgaactcccgagaattttccttgtaagaatctggatgaaaactactgtagaaatccagatggaaaacgcgccccctggtgtcacacgacgaatagccaagtaaggtgggaatactgtaagatcccttcctgtgactcaagccccgtgtcaaccgagcagctcgcacccacagcacccccggagctgacccccgttgtgcaagactgctatcacggagatgggcaatcctatcgggggacctctagcaccacaacgaccgggaagaaatgccaaagctggtcttctatgacaccccaccgccaccagaaaacccctgagaattaccctaacgccggactgacgatgaattattgcagaaaccccgacgctgacaaaggaccatggtgctttacgacggatccaagcgtgcgctgggagtactgcaacctgaagaagtgttctggcacagaggccagtgtcgtcgctcctccaccagtcgtgctgttgccagacgtcgaaacacccagtgaggaggattgtatgtttggcaacggaaagggctaccgggggaagagggccaccacggtgaccggtactccttgtcaggattgggcagcacaggaaccacatagacacagtatattcacgccagaaacaaaccccagagccggtctcgagaagaactactgccgcaaccctgacggcgacgtgggaggcccctggtgttacaccactaacccaaggaaactgtacgattattgtgacgtgccccagtgtgccgcgcccagttttgactgtgggaaaccgcaagtcgaacctaagaaatgcccaggacgggtggtgggcggatgcgtagcacatccacatagctggccctggcaggtgtcactgaggacacgattcggcatgcatttctgcggcggtactctcatctctccagagtgggtactgactgcggcccactgcctggagaagtcccctaggccctcaagctacaaggtcattcttggggcccaccaagaggtgaatttggagccacacgtgcaagaaatagaagtaagtagactgtttctggaaccaactagaaaggatattgcactgctcaagttgtcaagtccagcagtgattacggataaggtcatccccgcgtgtctgccctcccctaactacgtcgtggccgacaggaccgaatgttttataacaggatggggtgagactcagggcacattcggcgcagggctcttgaaggaggctcagttgcccgtgattgaaaataaagtgtgcaacaggtacgagttcttgaatggccgagtgcagtctacagagctgtgcgcaggccaccttgcagggggcaccgattcatgccaaggggatagtgggggacctttggtgtgcttcgagaaagataagtatattctgcagggggtcacatcttggggcttgggctgtgcccgccccaacaagccaggcgtgtatgtccgcgtttcccgcttcgtgacatggatcgaaggcgtgatgcggaataac

SEQ ID NO: 250924 - DNA, 2430 bp, synthetic construct
  misc_feature 1..2430: note = Description of Artificial Sequence: Synthetic coding sequence
  source 1..2430: mol_type = other DNA
atggagcacaaggaagtcgtgctgctgttgctcctgttccttaagtcggggcaaggagaaccgttggacgattacgtgaatactcaaggagcctcactgttctccgtgaccaaaaagcaactgggagcaggaagcatcgaagagtgcgcggccaaatgcgaagaggacgaggagttcacttgtagggcctttcaataccactccaaagagcagcagtgtgtgatcatggcggagaatcgcaagagctcaatcatcatccgcatgcgcgatgtcgtgttgtttgaaaagaaggtgtacctgtcggaatgcaaaactggaaacgggaagaactacaggggaactatgtccaagaccaaaaacgggatcacctgccaaaagtggtccagcacctcgcctcaccgcccgcgcttctcaccggctacccacccgagcgaaggacttgaggagaattactgccgaaatccggataatgatccacaaggcccctggtgctacactaccgatccggaaaagcggtacgattactgcgacattctcgagtgcgaagaggagtgcatgcattgttcaggcgaaaactatgatggtaagatttctaagaccatgtccggcctcgagtgccaggcatgggactcgcaaagccctcatgcgcatggctacattccatccaagttcccaaataagaacttgaaaaagaactactgccggaaccctgaccgggagcttcgcccctggtgtttcaccacggatccaaataagaggtgggaactctgcgacatcccgagatgcaccaccccaccgccctcatccggaccgacctatcagtgtttgaaaggaaccggagagaactatcggggcaacgtcgccgtgactgtctcaggacatacttgccagcattggagcgcccaaactccacacactcacaaccgcactcccgaaaacttcccatgcaagaatttggacgagaattactgtcgtaatccagatgggaagcgcgcaccgtggtgccacaccacgaattctcaagtgcgatgggaatactgtaagatcccaagctgtgacagctccccagtgtcgaccgaacagctcgcacctactgccccgcctgaactgaccccagtggtgcaggactgctaccacggagatggtcaaagctaccggggaacttcttcgacgacgacgaccgggaaaaagtgccagtcgtggagctcaatgacgccgcaccgccatcaaaaaacgccagaaaactacccgaatgctggcctcaccatgaactactgtaggaacccggatgcggataagggtccgtggtgcttcactacggatccgtcagtgcggtgggaatactgcaatctcaagaaatgctccggcacggaagcctccgtggtggcccctccaccagtggtgctccttccagacgttgaaaccccttccgaagaggactgcatgttcggaaacggtaaaggttacagaggaaagagagcaactactgtcaccggtactccgtgccaggactgggcagcacaggaaccccaccgccatagcatcttcacccccgagacgaatccgcgcgctggcctcgaaaagaattactgcagaaaccctgacggggacgtgggaggcccgtggtgttacaccacgaaccctcgcaagctgtacgactactgcgacgtgccgcagtgcgcagccccctcgtttgactgcgggaaacctcaggtcgagcctaaaaagtgccccggaagggtcgtcggcggctgcgtggcccatccgcatagctggccttggcaagtgagccttaggactcggttcggaatgcacttctgtggtggcaccttgatcagccctgagtgggtgctgactgctgcacactgcctcgaaaagtcgccgcgaccttcttcctacaaggtgatactgggagcccaccaggaagtcaacctggagccgcacgtgcaggaaatcgaagtttcgagactgttcctggagcccactcgcaaagacatcgctctgctcaagctcagctcaccggccgtgatcactgacaaggtgattcccgcatgtctgccgtccccgaactacgttgtggcggaccgcactgagtgttttatcaccggctggggggaaacccagggaacgttcggcgctggactgctgaaggaagctcagctcccggtgattgaaaacaaagtctgtaacaggtacgagtttctgaacggtcgtgttcagtcaactgagctgtgtgctggacacctggcgggaggaactgactcgtgccagggagattccggaggccctctcgtttgctttgagaaggacaagtatatactgcagggggtcacgtcatggggcctgggatgcgcccggcctaataagccaggagtctacgtgcgagtgtcccgcttcgtgacctggatcgaaggtgtcatgcgcaacaac

SEQ ID NO: 250925 - DNA, 2430 bp, synthetic construct
  misc_feature 1..2430: note = Description of Artificial Sequence: Synthetic coding sequence
  source 1..2430: mol_type = other DNA
atggaacacaaggaggtggtgctgctgctcctattgttcctgaaatccggccagggagagccactcgatgactatgtgaacacacagggggcaagcctcttcagcgtaaccaaaaaacagcttggtgctggctctattgaagagtgcgctgcgaaatgtgaagaggatgaggagttcacatgccgcgcattccaataccacagcaaggagcaacagtgcgtgatcatggctgaaaacagaaagtcatcaataataatcaggatgcgggatgtggtactcttcgagaagaaagtctacctcagcgaatgcaagacaggcaatggaaaaaattaccgtgggaccatgagtaaaacgaagaatggaattacttgtcagaagtggtccagtacgagtccacaccggccaagattcagcccggctactcatcccagcgaaggactagaggagaactattgccggaaccctgacaatgacccacagggaccttggtgttataccactgaccctgagaagcgctacgactactgtgacatcctcgaatgtgaggaagaatgtatgcactgttctggagagaattacgatggcaagatcagcaagacaatgagtggtcttgaatgccaggcctgggattcacagtccccgcatgcgcatggctatatacccagtaagtttccaaacaagaatctaaaaaagaattattgtaggaaccctgaccgggaattgaggccctggtgtttcacaacggacccaaacaagcggtgggagctctgtgatatacctagatgcactactccacctcccagcagcggcccgacttatcagtgcctcaagggcaccggagaaaactacaggggcaacgtcgctgtcactgtgagcggtcacacatgccagcactggtcagcacagactccccacacgcataaccgcacacccgagaacttcccatgcaaaaacttggacgaaaactattgcaggaaccccgacggcaagcgcgcaccttggtgtcatacaacgaattcccaggtcaggtgggaatactgcaaaataccttcctgcgactcgtccccggtctcaaccgaacaacttgcgcccaccgccccaccagagttaaccccagttgtccaagactgctatcacggtgacggtcagtcctatagaggaacatcatccacgacgactacagggaagaaatgccagagctggtccagcatgacgccacataggcaccagaagaccccagagaattaccccaacgctggcctgacaatgaattactgtagaaaccccgacgctgataagggaccctggtgctttacgacggatccctctgtgcggtgggagtactgtaatctgaaaaagtgcagcggaacagaggcaagtgttgtggctccaccgccggtggtgctcttgcctgatgtcgaaacaccaagcgaagaggactgtatgttcggaaatggtaagggatacagaggtaagagagcgaccaccgtgaccggcacaccctgccaggactgggccgcgcaggaaccccaccgacactcaattttcaccccagagacgaatccccgcgcaggcctggagaagaactactgtcgaaaccctgacggcgatgtgggcggcccttggtgctacaccaccaacccaagaaaactttatgattactgcgacgtgccacagtgtgccgccccatcttttgactgtggcaagcctcaggtcgagcctaaaaaatgccctggtagagtcgtgggcgggtgtgtcgcccaccctcattcctggccctggcaggtgagcctgcggacccgcttcgggatgcatttttgcggcggtaccctaataagtccagaatgggtcctcacagctgcgcattgtctggaaaaatccccccgcccaagcagctacaaggtgattctcggggcgcatcaggaggtgaatctagagcctcatgtgcaggagatcgaggtttcacgactgtttctggagcccaccaggaaagatatcgcccttctgaagctgtccagccctgcagttataacagataaggtgatcccagcgtgcctgccgagcccaaattacgtagtggcggatcgcactgaatgcttcattaccgggtggggggagacacaagggaccttcggtgccggactcctgaaggaggctcaactgcctgtcatcgagaataaggtgtgcaaccgttatgagtttttaaacgggcgcgtacagtctactgagctgtgtgccgggcatctcgcaggcggcacggattcttgccagggggacagcggcgggcctttagtgtgctttgaaaaagacaagtatatactccagggagttacgtcttggggcctggggtgtgctcgtccaaataaacctggagtttatgtccgtgtgtcacgctttgtaacttggatcgagggcgtcatgcgcaacaac

SEQ ID NO: 250926 - DNA, 2430 bp, synthetic construct
  misc_feature 1..2430: note = Description of Artificial Sequence: Synthetic coding sequence
  source 1..2430: mol_type = other DNA
atggaacacaaggaggtggtgcttctgctcctcttgttccttaaaagcggacagggagagccactcgatgattacgtcaacacccagggggcctcactgttctccgtgaccaagaaacaactgggcgctggaagcatcgaggagtgcgcggctaagtgcgaagaagatgaggaattcacctgcagggcctttcagtaccactcaaaggagcaacaatgcgtcattatggcagagaacagaaagtcgtcgatcatcattcgaatgcgggacgtggtcctctttgaaaagaaggtgtatctgtcggaatgcaaaacgggcaatggaaagaattaccggggaactatgtccaaaaccaagaacggaatcacctgccagaagtggtcgtcgacgtcaccacaccggccgcggttctcgcccgccacgcacccatcggaaggcctggaagagaattactgcagaaaccctgacaacgacccacaggggccatggtgctacaccactgaccccgaaaagcgctatgactattgcgacatcctcgaatgtgaggaggagtgtatgcattgctcgggggagaactacgatggaaagatctcaaagaccatgtccggactggagtgccaggcttgggactcgcagtcgccgcatgcgcacggttacattccatcgaagttccctaataagaacctgaaaaagaactactgccgaaatcccgaccgggagctccgcccgtggtgcttcactactgacccgaacaaacgctgggaactgtgcgatatcccgcggtgcactacccctccaccttcctctggcccaacgtaccaatgtcttaagggaaccggagagaactaccggggtaatgtcgccgtgactgtcagcggacacacctgccagcactggtccgcacagacccctcacacgcataaccgaactccagaaaactttccgtgcaaaaatctggacgagaattactgtaggaatccagatggaaagagggccccttggtgccacactaccaactcccaggtgcgctgggaatactgcaagattccgtcgtgcgactcgtccccggtgtctactgagcagttggcgccgactgccccacctgaacttaccccggtcgtccaagactgctatcatggggacggacagagctaccgcggtacctcctcaaccaccacgaccggtaagaagtgccaatcgtggtcatccatgaccccacataggcatcaaaagactcccgagaattacccaaacgccggactgacgatgaactactgcagaaatccggatgccgataagggaccatggtgtttcaccaccgacccgtccgtgagatgggagtactgcaatctgaagaaatgttccggtaccgaggccagtgtcgtggcacccccgccggtcgtgctgctccctgatgtggagacgccgtcagaagaggactgcatgtttggaaatggcaagggctaccggggcaagcgcgcgactactgtcactggaactccatgccaagactgggccgcgcaggagccgcaccgccattcgatcttcacccctgaaactaatccgcgagccggcctcgagaagaactattgtcggaacccggatggagatgtggggggaccgtggtgctacacgactaacccgcggaagctgtacgactactgcgacgtgccgcaatgtgcggccccgtctttcgactgcgggaaaccccaggtcgaacccaagaagtgcccaggaagggtcgtgggcggatgtgtcgcccacccgcactcctggccgtggcaggtgtctcttcgcactaggtttggcatgcatttctgcggaggaactctgatctcgccggaatgggtgctgaccgcggcccactgtctcgagaagagccctaggccatcgtcctataaagtgatcctcggcgcccaccaggaggtgaacctggaacctcacgtgcaggaaatcgaagtcagccggctcttcctggagccaacccggaaggatatcgcgctgctcaaattgtcctccccagcggtgattaccgataaggtgatccctgcgtgccttccgtcaccgaattacgtcgtcgccgaccggactgagtgcttcatcactggctggggagaaacccagggaaccttcggcgctggcctgctcaaagaagcacagctgcctgtgattgaaaacaaagtgtgtaatcggtacgaatttctcaacggcagagtgcagtcgaccgagctctgcgcgggacatctggccggcggcacggattcatgccagggagattctggaggaccgctggtgtgtttcgaaaaggacaaatacatcctccagggagtgacctcatgggggctgggatgtgctcggcctaacaaaccgggagtctacgtgcgcgtgtcgcggttcgttacctggatcgaaggagtcatgaggaacaac

SEQ ID NO: 250927 - DNA, 2430 bp, synthetic construct
  misc_feature 1..2430: note = Description of Artificial Sequence: Synthetic coding sequence
  source 1..2430: mol_type = other DNA
atggaacacaaggaggtcgttctcctcctgctgctgtttctaaagtctggccagggggagcccctggacgactacgttaatacccagggagccagcctgtttagtgtgactaagaaacagcttggggctggctctatcgaggagtgtgccgccaaatgtgaggaagacgaagagtttacgtgtcgtgctttccagtatcatagcaaggaacaacagtgcgtcatcatggctgagaaccgaaagagctctataatcattcggatgagggacgtggtgctgtttgaaaagaaggtctatttaagcgagtgcaaaaccgggaatggtaaaaactatcggggcaccatgtctaaaacaaagaacggcatcacctgccagaagtggtctagcacctctccccataggccccggtttagtcccgctactcacccgagcgaaggtctcgaggagaactactgcagaaaccctgataatgatcctcagggtccttggtgctacacaactgatcctgaaaagcgatacgactattgtgatattttagagtgcgaggaagagtgcatgcactgctctggagagaactatgatggcaagatctccaagacgatgtcaggattggagtgtcaggcatgggattcgcagtcgcctcatgcgcacgggtatatcccaagcaaatttccaaataagaatttaaagaagaactactgccgcaacccagatcgggagctccgaccttggtgttttacaaccgaccccaataagagatgggaactctgtgatatccctaggtgtactaccccacccccctcctcaggccctacatatcaatgtcttaaggggaccggagaaaactatagaggaaacgtcgcagtgacagtgtctggtcatacttgtcagcattggagcgcccaaacgcctcacacccacaatcgcaccccggaaaattttccgtgtaagaatctggacgaaaattattgcaggaatccggatggaaagagagctccctggtgccataccactaactctcaggttcgttgggaatactgtaaaattccttcatgcgattcgagccccgtgtccacggagcagctggccccgaccgccccaccagagctaacccccgtggttcaggactgctaccacggcgatggccagagttatcgtggcacaagttctacaacaactacggggaaaaaatgccagtcttggtcaagcatgactcctcacaggcatcagaaaactcccgagaactaccctaacgccggtctcacaatgaactattgcaggaaccccgacgccgataagggcccatggtgctttaccacggatccatcggtccgctgggaatactgcaacctgaagaagtgttctgggaccgaagcctcagttgttgccccccctcccgtggtgctccttcccgatgtggagacaccatctgaggaagattgtatgttcggcaacgggaagggctatcgcggcaaacgagcaacaacagttaccgggactccttgtcaggattgggccgcgcaagaacctcaccgacacagtatcttcacccctgagacaaatcccagggcaggccttgaaaaaaattattgtcgaaatcccgatggtgacgtgggtggaccatggtgttacactaccaatcccaggaaactatacgattactgcgatgtgccgcagtgcgcagccccctcgttcgattgtgggaaaccacaagttgagccaaagaaatgtcccggccgagtagtgggcggctgcgttgcgcacccgcactcttggccctggcaggtaagcctgaggactagatttggcatgcatttctgtggggggacccttatttccccagaatgggtgcttacggccgctcattgcttggagaaatctccccggccgtccagttacaaggttatccttggcgctcatcaagaagtgaacctggagcctcacgtgcaagagatagaagtgtcccgactgtttctggagccaacgaggaaagacatcgcccttctaaaactttcgagccctgctgtgataaccgataaggtaatcccagcttgtttgccgtcaccgaattatgtggtcgccgacaggacagaatgtttcatcactggctggggcgagacacaggggacatttggcgccggcttgctcaaggaggcccagctgcctgtgatcgagaacaaggtgtgtaacagatacgaatttcttaatggccgagtgcagtctacagaactgtgtgccggacatctggcagggggaaccgattcatgccagggagattcgggtggtccactggtgtgctttgagaaggacaagtacatccttcagggagttaccagctgggggctgggctgcgcccgacccaataaaccgggagtgtacgtgagggtctcgagatttgtgacctggattgaaggagtgatgcgcaataat

SEQ ID NO: 250928 - DNA, 2430 bp, synthetic construct
  misc_feature 1..2430: note = Description of Artificial Sequence: Synthetic coding sequence
  source 1..2430: mol_type = other DNA
atggaacataaggaagtcgtgctcctgcttctgctgtttctcaaatctgggcaaggtgagccccttgacgattacgtcaacacccagggagcatcgcttttttccgtgaccaaaaagcagctcggtgcaggctcgatcgaagagtgtgccgcaaaatgtgaagaagatgaagaattcacttgtagagcattccagtaccattccaaagaacaacaatgtgtgatcatggcagaaaaccgaaagtccagcatcataattcggatgcgggacgtggtgctcttcgaaaagaaggtgtacctctccgaatgtaagaccggaaatggtaagaactacagaggtactatgtccaagactaagaacgggattacttgtcaaaaatggtcaagtacgtcacctcacagacctcgatttagccccgcaacgcacccttccgaaggcctcgaggaaaactattgtcgcaatccggacaatgatccacagggtccttggtgctacacgactgacccagagaagcgctacgattactgcgatatcctcgagtgtgaggaagaatgcatgcactgctcgggcgagaactacgatggaaagatcagcaaaactatgtccggactggaatgtcaggcttgggattcgcagtcgcctcatgcgcatggttacataccttccaaattccctaacaagaacctcaagaagaattactgtcgcaaccctgacagggaattgaggccatggtgttttacgaccgaccctaataagaggtgggaactgtgcgatatccctcgatgtactacccctcctccaagcagcggacctacctaccagtgccttaagggtactggcgaaaactaccgtggtaatgtcgcagtcacggtgtcgggacacacttgccaacattggtccgcgcagaccccgcatactcacaacagaacccccgagaactttccatgtaaaaacctggacgaaaactactgtaggaacccagatggaaagcgtgcaccatggtgtcatactactaactcccaagttaggtgggagtactgtaagattccttcttgcgactcttcgccggtgtcgactgaacaactggctccaactgcaccccccgaactgaccccagtggtgcaggattgctaccatggggatgggcagagctatcgtgggacctcctccactaccactactggaaagaaatgtcagagctggagctctatgactccccatcgacaccaaaaaaccccagagaattacccaaacgcgggccttaccatgaactattgcaggaacccagacgcggataaagggccttggtgctttactaccgacccaagcgtgagatgggaatactgcaatctcaagaagtgtagcggaaccgaagcgtctgtcgtggctcctccccccgtcgtgctccttccggacgtggagacgccttcggaggaggactgcatgttcgggaacggaaagggttaccgtggaaagcgagcaacgaccgtgaccggaactccttgtcaagattgggccgcacaagagccccataggcattcgatctttaccccggagactaaccctcgagcaggtttggaaaagaactactgtagaaatcccgatggagatgtaggtggaccttggtgctataccactaaccctcgcaagctgtacgattattgtgatgtgcctcaatgtgcagccccctccttcgattgtggaaaaccacaggtggaaccaaagaagtgtcctgggagggtcgtcggcggttgtgtggcccacccccactcgtggccatggcaagtatcactgcggaccaggtttggaatgcacttttgtggaggtactctgatctcgccagagtgggtgcttactgcagcacactgtcttgagaagagccctcgaccttcctcatacaaagttattctgggcgcccatcaagaagtcaacctcgaacctcatgtgcaagaaatcgaggtgtcaagactgtttctggaacctacccgtaaagatatcgcactgctgaaactttcctccccagccgtgattacggataaagtgatccctgcctgtctgcccagcccaaattacgtggttgcagatcgcaccgaatgctttatcactggctggggtgagactcaggggacgttcggagccggactgcttaaagaagcccaattgcccgtgatagaaaacaaagtgtgcaatcgatacgaatttcttaacggtcgggtccaatcgaccgaattgtgtgccggtcatctggcagggggcaccgacagctgtcagggtgattccggtggacccctggtgtgcttcgagaaagacaagtacattctgcaaggcgtcacctcctggggacttggatgtgcacgccccaataagccgggggtgtacgttcgtgtgtcgcgttttgtgacttggattgagggagtgatgagaaacaac

SEQ ID NO: 250929 - DNA, 2430 bp, synthetic construct
  misc_feature 1..2430: note = Description of Artificial Sequence: Synthetic coding sequence
  source 1..2430: mol_type = other DNA
atggagcacaaagaggtggtgttgcttctcctgctttttctgaagtcgggtcagggagaaccacttgatgactacgtcaatacgcagggtgctagccttttttccgtcaccaagaaacaactgggtgcaggaagtatcgaagaatgtgccgcaaagtgtgaagaggacgaggaatttacctgcagagcattccaataccattcgaaagaacagcaatgcgtcattatggcagagaatagaaagtcatcgatcattatcagaatgcgcgatgtggtgctgtttgagaaaaaagtctatctctccgaatgtaagacgggcaatgggaagaattacaggggtactatgagcaagactaaaaacggaatcacttgtcagaagtggtcgtccacttccccgcataggccaagattttcaccagcaactcatccttcggaagggctggaggaaaactattgccgtaacccagataacgacccccaagggccatggtgctacaccactgacccagagaagcgatatgattactgtgacatactcgaatgtgaagaggagtgtatgcattgcagtggagaaaactacgacggtaagatttcaaaaactatgagtggactcgaatgtcaggcatgggattcccagtccccacatgcgcatggctacattccttccaaattcccaaacaagaatctcaagaagaactattgcagaaatcctgatagagaacttagaccgtggtgttttactaccgatcctaacaagaggtgggagctgtgtgatatccctagatgtactactcccccgccaagctcgggcccgacctaccagtgcctgaagggcaccggagagaactatagaggcaacgtggcagtcaccgtctcaggccacacttgtcaacactggagcgcacaaacgccacacacccataaccggactcccgaaaactttccctgcaagaacttggatgaaaactactgcaggaatcccgacggaaagagggcaccttggtgtcataccactaattcgcaggtgagatgggagtactgcaagattccatcctgtgatagctctcctgtgtcaaccgagcagctcgcccctacggccccgcctgagcttaccccagtggtccaagattgctaccacggagacggacagagctatcggggaacctcgtcgactactacgactgggaaaaagtgtcagtcgtggtcctcgatgaccccgcaccgacatcaaaaaacccctgaaaactaccctaacgcaggtcttactatgaattactgtcgcaacccggatgcagataaaggaccatggtgtttcaccaccgaccctagcgttcgatgggaatactgcaatcttaagaagtgttctggaaccgaagctagcgtggtggccccacctcctgtggtgctgctgccagatgttgagactccatcagaagaagattgtatgttcggtaacgggaaaggatacagaggtaagcgtgctaccaccgtgaccggtactccctgtcaagactgggcggcacaggaacctcatcgccacagcatctttactcctgaaacgaaccctcgcgcaggcctcgagaaaaactattgtagaaatcccgacggcgatgtaggcggaccttggtgctatactaccaatccacgcaagttgtacgattactgtgatgtccctcagtgcgccgcacctagcttcgattgtgggaagccgcaagtggaacccaagaagtgtccgggtagggtcgtcggaggctgcgtggcacatcctcattcatggccttggcaggtgtcccttcggacccgctttgggatgcatttttgtggcggtacgctcatcagccctgaatgggtgcttaccgcagcacactgccttgaaaaatcgcccaggcctagctcgtacaaagtgatcttgggagcgcaccaagaagtgaacctggaaccacatgtgcaagagatcgaagtcagcagattgttccttgaacctacccgcaaggacattgcactccttaagctgagcagccccgcggtcataactgataaggtcatccccgcatgccttcctagccctaattacgttgtggcagaccggaccgagtgcttcataaccggctggggtgaaactcaaggaactttcggagcaggactgcttaaggaggcacaactcccggtgattgaaaacaaggtgtgtaaccggtacgagttcctgaacggacgcgtgcaatccaccgagttgtgtgccggtcatttggcgggtggtaccgactcctgccaaggtgattcaggaggccccctggtgtgcttcgaaaaagataagtacatactgcagggcgtaaccagctggggacttggttgcgcaagacctaataagcctggtgtgtacgtgcgcgtgtcgaggtttgtcacttggattgaaggagtgatgcggaacaac

SEQ ID NO: 250930 - DNA, 2430 bp, synthetic construct
  misc_feature 1..2430: note = Description of Artificial Sequence: Synthetic coding sequence
  source 1..2430: mol_type = other DNA
atggagcacaaggaagtggtcttgctgcttttactttttcttaaaagcggccagggcgaacccctcgacgactacgtcaacacccagggtgcgtcactgttttccgtgacgaagaagcagttgggggccgggagcatcgaagagtgtgcagctaaatgcgaagaggacgaggaatttacttgccgagcgttccagtatcactctaaagaacaacaatgcgtcatcatggctgagaatcgcaagagcagcatcattatccgaatgcgagacgtcgtcctgtttgaaaaaaaagtttatctttccgaatgtaagaccggcaacggtaaaaactacaggggcactatgagcaagaccaagaatgggattacttgtcagaaatggtcaagcacctcgcctcatcgcccccgtttctctcccgcaacacatccgtctgagggactggaagaaaactactgtcggaaccctgataacgatccccaaggcccctggtgttacacaacagatccagaaaaacgttatgattactgcgatattctggaatgtgaagaagagtgtatgcactgctccggagaaaactatgatggcaagatctcaaagactatgtccggtctggaatgccaggcctgggactcacaatctcctcatgcgcacggatatataccttcaaaatttccgaacaagaatcttaaaaagaattattgtaggaatcccgaccgggaactcaggccctggtgttttactaccgacccaaataagcgctgggagttatgtgacataccaaggtgtaccaccccccctccctcatcaggccccacttatcaatgcctgaaaggcactggcgagaattacaggggaaacgtggcggtcacagtgtctggccatacctgtcagcattggagtgcccagacgccccatacccataatcggacccctgagaactttccctgtaaaaacctagacgaaaactactgcaggaaccccgacggaaaaagggctccctggtgtcacaccacaaatagtcaggtgcgttgggaatattgcaagattcccagctgcgactcatcaccagtgtccacggagcagctcgcccctactgcccctcctgaactgactcctgttgtccaggactgctatcacggcgacggccagagctaccggggcacttcctctacgaccactaccggaaagaaatgtcaaagttggtctagtatgacaccacaccggcaccagaaaacaccagaaaattatcctaatgcgggcctcacaatgaactactgtcgcaatccagatgctgacaaaggcccctggtgctttactacagatccctccgtcaggtgggagtattgtaacctgaagaaatgctctggtacagaggcatcggtggtggctccaccccctgtagtgcttcttccggatgtggaaacaccatcggaagaggactgtatgttcggaaatgggaaaggctatagggggaaacgtgccacaaccgtgaccggcactccttgccaggactgggcagcccaggagcctcaccgccattcaatatttacgccagagaccaatccgagggcaggattggagaagaactactgtagaaatcctgacggtgacgtcggcgggccctggtgctacacgactaatccacggaagttgtacgattactgtgatgtgccccagtgtgcggccccgtcatttgattgcggaaagccccaggtggagccaaagaaatgccccggaagagttgtgggcggctgtgttgctcaccctcattcttggccctggcaggtgtcattgcggactagattcgggatgcacttctgcgggggcaccctcatctcacctgagtgggttctaaccgccgcccattgcctcgaaaagagccccaggcccagctcctataaggtcattttaggcgctcaccaggaggttaatctggagcctcacgtgcaggagattgaggtatcccgcctgttcttggaaccgacccggaaagatattgccctgctaaagctgtcttcgcccgccgtaatcacggataaagtcatccctgcttgtcttccaagcccaaattacgtggtggctgacagaaccgagtgcttcatcacaggttggggcgaaacgcagggaaccttcggtgccgggctccttaaggaggctcaactgcctgtgatcgagaataaagtgtgcaaccgatacgagttcctgaatggccgtgttcaatctacagaactctgtgctgggcatctagctggaggcactgattcctgccagggcgattcaggaggccctctggtgtgtttcgagaaggataagtacatcctgcagggggtaaccagctgggggctcggctgtgctagacccaacaaaccgggcgtatatgttcgtgtatcccgctttgtaacttggatcgagggggttatgcgtaataac

SEQ ID NO: 250931 - DNA, 2430 bp, synthetic construct
  misc_feature 1..2430: note = Description of Artificial Sequence: Synthetic coding sequence
  source 1..2430: mol_type = other DNA
atggaacataaggaggtcgttctgctgctcctgctgttcttaaagagcggccaaggcgagccactagatgattacgtaaatacccagggcgcttctcttttcagcgtcaccaagaaacagctgggagccgggtctattgaggaatgcgccgccaaatgcgaggaagacgaggagtttacctgtcgtgccttccagtaccattcaaaggagcagcagtgcgtcatcatggcagaaaatcgtaaatcctccatcattattcgtatgagagacgtggttctctttgagaagaaggtctatctgtcagagtgcaagacaggtaacggcaaaaattacaggggtactatgtctaaaacaaaaaacggcatcacctgtcaaaagtggagctccacaagcccccaccggccacggttttcccccgcgacacatccatccgagggccttgaggaaaactattgcagaaatccggataatgacccacagggaccatggtgctacaccacagatccagagaaacgctatgactactgcgatattctggagtgcgaagaagaatgcatgcattgtagtggcgagaactatgacggcaaaatatctaaaacgatgtccggcctcgaatgccaggcttgggatagccagtctcctcacgctcatggttacatccctagcaagtttcctaataagaacctgaaaaagaactactgccgcaatcctgatagggaactccgcccttggtgtttcacaaccgacccgaacaagaggtgggagctatgcgacatccctagatgcactaccccccccccgtcgagcggacctacatatcaatgcctgaaggggaccggagagaattataggggtaacgtggccgtcacggtgtcgggacatacctgtcagcactggtcagcccagacgcctcacacccacaacagaacaccagagaatttcccctgcaaaaatctggacgaaaattattgccggaaccccgacgggaaacgcgccccatggtgccacacaacgaattcacaggtgaggtgggagtactgtaagataccctcttgtgactctagcccagtgtctacagagcagttagcacccaccgccccccctgaactgaccccggtggttcaggactgctaccacggagatggacagagctaccgggggacatctagtactaccaccactggcaaaaaatgccagtcatggagctcaatgacacctcaccggcaccagaagacaccagagaattacccaaatgccggattgacaatgaattactgtaggaaccctgacgcagacaagggcccatggtgctttactaccgatccatctgttcgatgggagtactgcaacctgaagaagtgttctgggaccgaggctagtgttgtcgccccgccgcccgttgtgctgttgcctgacgtggagacacccagcgaggaggactgcatgttcggcaatgggaagggctaccggggaaaacgggccactacggtcaccggaaccccatgccaggattgggcggctcaggagccgcacagacactcaatctttactcccgagaccaacccccgggccggcctggagaagaactactgtaggaatccagatggagatgtgggtggtccctggtgttatacaacaaaccctaggaagctctacgactactgcgatgtgcctcagtgcgctgcaccctccttcgactgtggaaagcctcaggtcgagcccaagaagtgcccagggcgggtggtgggaggctgtgtggcgcatcctcacagctggccgtggcaggtgtccttgcgcaccagatttgggatgcacttttgcggcggcacattgatcagccctgaatgggtcctaaccgctgcccactgccttgaaaaatcacctcgaccttcttcctataaggtgatcctgggcgcacatcaagaggtcaaccttgagccacatgtgcaggaaatcgaggtgagcagactctttttggagcccacacgcaaggatatcgcccttctgaagttgtcctctccggctgtgattaccgataaagtgatccccgcttgccttccttcaccaaattatgtcgtagcggaccggactgagtgctttataacaggatggggcgagacacagggaaccttcggagccggtctactgaaggaggcccagttgcccgtgatcgagaacaaggtatgcaaccggtatgagttcctgaatggccgggtacaaagcaccgagctgtgcgcaggacacctagcagggggaactgacagctgccagggcgacagcggagggcctctggtgtgtttcgaaaaagacaagtacatccttcagggagtgacttcctggggcctcggatgcgcccggccaaacaagccgggtgtgtacgtgcgtgtaagtcgattcgtcacatggattgagggggtgatgcgcaataat

SEQ ID NO: 250932 - DNA, 2430 bp, synthetic construct
  misc_feature 1..2430: note = Description of Artificial Sequence: Synthetic coding sequence
  source 1..2430: mol_type = other DNA
atggaacataaggaagtggtgttgctgctgctcctttttctgaagtcaggacagggggagccattggatgattacgtcaatacccaaggggcatcccttttttccgtgaccaaaaagcaacttggagcagggtccatcgaagagtgcgcagccaagtgtgaggaagatgaagaatttacttgccgcgcatttcaataccattcgaaggaacaacagtgcgtcattatggcagaaaacagaaagagctcgataatcatcagaatgcgagatgtcgtgctgtttgagaagaaagtctacctctccgaatgcaaaactggcaatggcaagaattaccggggtaccatgtccaaaaccaagaacggcattacttgtcagaagtggtcatccaccagcccacatcgcccacgcttcagccccgctacgcatccatccgaaggtctggaggagaattactgtagaaaccccgacaatgatccccaggggccatggtgctacacgactgatccagaaaagaggtacgactactgcgacattctcgaatgcgaggaggaatgtatgcattgttcgggagagaactacgatggtaagataagcaagactatgtccggacttgaatgccaggcatgggattcacagtctccacacgcccatggatacattccgtcaaagtttcccaacaagaatctgaagaaaaactactgtaggaacccagaccgggaacttcgcccttggtgttttaccaccgaccccaataaacgatgggaactttgtgatattcctagatgcaccactcctcccccctcatcgggaccgacctaccaatgtctgaagggaaccggagaaaactaccgaggcaacgtggcagtcacggtatctggacatacgtgtcagcattggtcggcgcagaccccacatacgcataatcgaacgcctgaaaacttcccctgcaagaatcttgatgagaactattgtcggaatcccgacggtaagagagcaccctggtgccacactacgaattcacaagtcaggtgggaatactgcaaaattccgagctgtgatagctcccccgtcagcaccgaacaactcgcacctaccgcgcccccggaacttacccctgttgtgcaagattgctaccatggtgacgggcagtcctaccgtggaacctcctcgaccactaccactgggaagaaatgccaaagctggtcgagcatgactccacaccgtcaccaaaagacccccgaaaactacccaaatgcaggactcaccatgaactattgtagaaacccggatgctgacaaaggtccgtggtgtttcactaccgatcccagcgtgagatgggagtactgcaacctcaagaagtgctccggaaccgaggcctcagtagttgcgccaccaccagtggtcctcctgcccgacgtggaaaccccatcagaagaagattgtatgttcggaaacggaaaaggctaccgcgggaaaagagcgaccacggtgaccggtaccccttgtcaggattgggcagcacaagaacctcaccggcattcaattttcactccggaaactaaccccagagcaggattggaaaagaactattgccgaaatccagatggtgatgtcgggggtccatggtgctatactacgaaccctcggaaactctacgactactgtgatgtgccccaatgtgcagccccctcatttgactgtggaaaaccccaggttgaaccgaagaaatgtcctggtagggtggtgggtggttgtgtcgcacatcctcattcatggccctggcaggtgtcgctcaggaccagatttggtatgcacttttgtggaggaaccctcatttcccctgagtgggtcctgaccgccgcacattgtcttgagaaatcccctcgaccgtccagctacaaagtgattcttggtgcccaccaagaagtgaaccttgaaccacacgtccaggaaatcgaggtgtccagattgttccttgaaccaacccgaaaggatattgcccttctgaaactgtctagcccggctgtgattactgataaagtgatcccagcttgccttcctagccctaactacgtcgtcgccgatcggactgaatgctttatcactggttggggtgaaactcaagggacttttggggcaggacttctcaaagaagcgcagcttcctgtcatagagaacaaagtgtgtaatcgctacgaatttctgaacggccgcgtccaaagcacggaactgtgtgccggacaccttgcgggaggaactgactcatgccaaggagattcgggaggaccgcttgtgtgctttgagaaggataagtacatcctccagggggttacctcctgggggctgggctgcgcgcgtcctaacaagcctggagtgtacgtccgtgtctccaggttcgtgacttggattgaaggtgtgatgcgcaataac

SEQ ID NO: 250933 - DNA, 2430 bp, synthetic construct
  misc_feature 1..2430: note = Description of Artificial Sequence: Synthetic coding sequence
  source 1..2430: mol_type = other DNA
atggagcacaaggaggtggttctcttgctgttgctctttttaaagtcaggtcagggggaacccctcgacgattatgtcaacactcagggagccagcttgttcagcgtgaccaagaagcagctgggtgcgggttctattgaagaatgcgcagctaagtgcgaggaagatgaggaattcacctgcagggcatttcaatatcactctaaagagcagcagtgcgtgatcatggcagagaacaggaagagctccataataatccgaatgagagacgttgtgctgttcgagaaaaaggtatatctgtccgagtgcaagaccggtaacggcaagaattatagaggaacgatgagtaaaaccaagaatggcataacctgccagaagtggagttccacatcacctcacagaccaagattctctccagcaacccacccctccgagggactggaggagaactactgtcgcaatccggataacgaccctcaagggccctggtgttatacgactgatcctgaaaagaggtacgattattgtgatatcttggagtgcgaagaagaatgtatgcactgtagcggggaaaattatgacggcaaaatctccaaaaccatgagcggtttggagtgtcaagcctgggatagccagagcccacatgctcacgggtatattcccagcaaattcccaaataagaatttgaagaagaactattgtcgtaatcccgacagggagctgagaccatggtgttttaccacagacccaaataagcgatgggagctgtgtgatattccaaggtgtacaacgccccctccaagcagcggccctacatatcagtgtcttaagggaacaggggagaattatcggggtaacgtggctgtgactgtcagtggacatacatgtcagcactggagtgcacaaactccgcacacacacaatagaacaccagagaatttcccttgcaagaacctagatgagaattactgtaggaaccctgatggaaagagagctccctggtgtcatacaactaacagccaggtaagatgggaatactgtaaaattccctcctgcgacagcagtccagtctccacagaacaattggcccctacagcaccccccgagctgaccccagtggtccaggattgctaccatggggatggccagtcctatcgcgggacaagtagtaccacgacaactggcaaaaaatgtcagtcttggtctagcatgaccccgcatcgacaccaaaagacccccgaaaactatcccaatgctgggctgacaatgaactactgtcgtaatccagatgccgataagggtccttggtgtttcacaacggatccatccgtgagatgggagtactgcaatttgaaaaagtgcagcggcaccgaagcttccgtggttgctcctcctcctgttgttctactcccagacgtggagacaccctccgaggaagactgtatgtttggcaacgggaaagggtaccggggtaagcgggctaccacggtgaccgggacaccttgtcaggattgggcagcacaggagccacatcgtcattccattttcacacccgaaacaaaccctagagccggtctggagaagaactactgcaggaatcctgatggcgacgtgggaggcccttggtgctacacaacaaatccgaggaagttgtacgattattgtgacgtgccgcaatgcgccgcgccctcatttgactgtggtaaaccacaagtcgagcctaagaaatgcccgggccgagtagtaggcggatgtgtggcccacccccactcgtggccctggcaggtgtctctaaggacacggttcggcatgcatttctgtggtggaactttgatttctcccgagtgggttctgaccgccgcgcactgcttggagaaatccccccggccctcctcctacaaggtgattctcggcgcacaccaggaggtcaatctcgaacctcacgttcaggagattgaagtttctcgcctcttcctcgaacctacgcgaaaggatatcgctctgctcaagctctcatcccccgctgttattacggacaaagtcattcccgcatgcctgcctagcccaaactacgttgtggcagaccggaccgaatgtttcattacagggtggggggaaacgcaaggcaccttcggtgcagggttgctcaaagaggcccagctcccagttatcgaaaataaggtgtgcaatcgctatgagttcttgaacggcagagtccagagtaccgaactatgtgctggacatctcgcaggcggcacagattcttgtcagggtgactcaggtgggccactcgtctgttttgaaaaagataagtatatcctgcagggtgtgaccagttgggggttagggtgcgcgcggccaaataaacccggcgtgtatgtcagggtgtcgagattcgttacatggatcgagggagttatgaggaacaac

SEQ ID NO: 250934 - DNA, 2430 bp, synthetic construct
  misc_feature 1..2430: note = Description of Artificial Sequence: Synthetic coding sequence
  source 1..2430: mol_type = other DNA
atggagcacaaagaagtagtgcttcttttgctgctgttcttgaagtccggccagggagagccactcgatgactatgtcaatacccagggcgcctcactgttttctgtgaccaagaaacagctgggtgctggcagcatagaagagtgcgccgccaaatgcgaagaagatgaagaattcacttgtagagcatttcagtatcacagcaaagagcagcagtgtgtgatcatggctgaaaataggaaaagctccataataatcaggatgcgcgacgtcgtgctctttgaaaagaaggtgtatttatctgaatgcaagaccggaaacgggaagaattacagggggacaatgtcaaagactaagaacggcataacttgccagaaatggtcctccactagcccccaccgtcctcggttctccccagcaactcacccaagcgaaggactggaggaaaactactgtcgaaaccctgacaatgatcctcagggtccatggtgttataccacagacccagagaaaagatatgactactgcgatatcttggagtgcgaagaagagtgcatgcattgctcaggtgagaattacgatgggaagattagcaagacaatgagcggtctagaatgtcaagcctgggactcccaaagtccccacgcacatggatacatccccagcaaattcccaaacaaaaatttaaagaaaaactactgtcgtaaccccgaccgggagctcagaccttggtgcttcactacggacccaaacaaacggtgggagttatgcgacattcctagatgtactactcctcctcccagttccggcccgacttatcagtgtctgaaggggactggtgagaactaccgaggaaatgttgcagttacagttagcggccatacgtgtcagcactggtccgcacagactccgcacacccacaatcgaactccggagaacttcccatgtaagaatctggacgagaattactgtaggaatcccgatggcaaacgcgctccatggtgccacacgacgaattcccaggtgcggtgggagtactgcaagatcccatcatgcgattccagtcccgttagtaccgagcagttagcccctactgcaccccccgagctcactcctgtcgtgcaggactgctaccacggcgatgggcaaagctatcggggtacctcctcaacaacaaccacgggaaaaaaatgccagtcttggtcgagtatgaccccccatcgtcatcagaagacacctgaaaactaccccaatgccggattgaccatgaattattgcaggaaccccgatgccgataaggggccatggtgttttactaccgacccctcagtgcgatgggagtattgcaacttgaagaagtgctcgggtacggaggcatctgttgtagcccctcctcctgtggttctgctgccagatgtagaaacaccaagtgaggaggattgcatgtttggaaatgggaaggggtatcgaggaaagcgggcgacaacggtgaccggtacaccatgccaggattgggcggcccaggaaccccaccggcacagtatctttacgccggagacgaatccaagagcaggcctggaaaaaaattactgtaggaatccagacggtgacgttgggggaccatggtgctataccaccaatcctcgcaagctgtacgattactgtgatgtgccgcaatgcgctgccccatctttcgactgcggcaagcctcaggtcgagccgaagaagtgtcctggacgagttgtcgggggatgcgttgcacacccacacagctggccctggcaggtctccttgaggacccggtttggcatgcacttctgtgggggtacgctgatctctccagaatgggttctcactgcagcgcattgcctagagaaatcaccaagaccttcaagctacaaggtgatcctgggtgcgcaccaggaggtcaacctggaacctcacgtccaagaaatcgaagtctcaagactcttcctagaacccaccaggaaagatatcgcgctgctaaaactgtcttcgccggccgtgatcaccgacaaggtcatccccgcgtgtctccccagcccaaactacgtggtcgcagataggacagagtgtttcataacggggtggggggagacccaaggaacctttggggcggggctgctgaaggaggcccagctgcctgtgattgagaataaagtatgcaaccgatacgagttcctgaacggccgagtgcagagtacggagctgtgtgcaggccatcttgccggagggacggacagttgtcagggcgatagcggggggcctcttgtgtgctttgaaaaggacaagtacattcttcagggtgtaacctcatggggccttggatgcgctcggccaaacaagcctggcgtatacgtgagggtttccagattcgtgacctggatcgaaggcgttatgcgaaacaac

SEQ ID NO: 250935 - DNA, 2430 bp, synthetic construct
  misc_feature 1..2430: note = Description of Artificial Sequence: Synthetic coding sequence
  source 1..2430: mol_type = other DNA
atggagcataaggaagtcgtgctcctcctgcttctattcctcaagtccgggcagggagagccacttgacgactacgtgaatacccagggggcttcattgttttccgttactaaaaaacagctgggagccggatccattgaggaatgtgcggctaaatgcgaagaggatgaagaattcacatgtagagcgttccagtatcatagcaaagaacagcagtgcgtgattatggctgagaataggaagagttcgataatcatccgaatgcgcgacgtagtgctatttgagaaaaaagtgtacctgtcagagtgcaaaactgggaatgggaagaactaccgtggcaccatgagtaagaccaaaaatggcattacttgccagaaatggtcctctacatctccccacaggcccagattcagccctgcaacacatccttctgagggtttggaagagaactactgtcggaatccggacaacgatccacagggcccatggtgttacacaacggatcccgaaaagagatacgactactgtgacatccttgagtgtgaggaggagtgcatgcactgctcaggcgaaaactacgatggaaaaatttcaaagactatgtccggtctcgaatgtcaagcctgggattcccagagcccgcacgctcacgggtatatcccttcaaagtttccgaacaaaaatttgaagaagaattattgccggaatcctgatagagagctccgaccgtggtgtttcactacagaccctaataagaggtgggagttgtgcgacattccgaggtgcacaaccccgcccccgtcttccgggcccacctatcagtgccttaagggcaccggcgagaactacagagggaatgtggccgtaaccgtgtcggggcacacctgtcaacactggtctgcgcaaacccctcatacgcacaacagaacgccagagaactttccctgcaaaaatctcgacgagaactactgcaggaaccccgatggcaagagagcaccttggtgtcatacaaccaattctcaggtacgttgggagtactgtaaaatcccctcttgtgactcctctccagtgagcaccgagcagctagccccgacagcacccccagaactaacgcccgtagtccaggactgttatcatggcgatggccagtcttatcgtgggacttcatcaacgactaccacaggtaagaagtgccagtcttggtcatccatgacgccacataggcatcagaagacacctgagaactaccccaatgccggtctcacaatgaattactgccgaaatccggacgcagacaagggaccatggtgcttcacgacagatccttctgtcaggtgggagtattgtaatctcaagaagtgttctgggactgaagcatctgtggtggcccctccgcctgtggtactgctcccagatgttgaaactccttctgaggaggactgcatgtttggaaatggaaagggctatcgtggcaagagagcaaccacggtgactggaacgccctgtcaagattgggcggcccaggaaccacatcgtcacagcatcttcacaccagaaactaacccacgcgcaggcctggaaaagaactattgtaggaaccctgatggagacgttggcggaccgtggtgttacacaactaacccgcggaaactctacgattattgcgacgtgccccagtgcgccgccccgtccttcgactgtggaaaacctcaggtggagccgaaaaagtgcccagggagagtcgtaggtgggtgtgtggctcatccacattcatggccatggcaagtgtctctgagaacacggttcggtatgcacttctgtggaggtactctgattagccctgaatgggtgcttaccgccgcccattgtctggaaaagtccccgaggccttcaagctacaaagtcatcctgggagcgcaccaagaggtgaacctggagccccacgtacaggaaatcgaagtgagccggctgttcctggaacccaccaggaaagatattgcactcctcaagctgtcatcccccgctgtcattacggacaaggtcatacctgcctgcttaccgtcccctaattatgtcgttgccgatcgcactgagtgcttcatcactgggtggggagagacgcaaggtactttcggggccggccttttaaaggaagcacaactccccgttatcgagaataaagtttgtaaccgctacgagtttctgaacgggcgcgtgcaaagtacagaactctgtgcgggccacttggcgggaggtaccgatagttgtcagggagattctggaggcccacttgtttgtttcgagaaagacaagtacatcttacagggagttaccagctgggggctgggttgtgctaggccaaacaaacccggggtgtacgttagggtgtctaggttcgtgacctggattgaaggagtaatgagaaacaat

SEQ ID NO: 250936 - DNA, 2430 bp, synthetic construct
  misc_feature 1..2430: note = Description of Artificial Sequence: Synthetic coding sequence
  source 1..2430: mol_type = other DNA
atggagcacaaggaagtagtactcctcctcctgctgttcctgaaatcaggccagggcgaacctctcgatgactacgttaacactcagggagcttcgttgttttccgtgaccaaaaaacaactgggagcggggtccatcgaggaatgcgccgccaagtgtgaggaggatgaggaattcacctgtagagccttccaataccacagcaaggaacagcaatgtgtgatcatggctgaaaaccggaaaagcagcataatcattcggatgcgcgatgtggtgctgttcgagaagaaggtgtatctgagcgagtgcaaaacggggaacggcaagaattacaggggaactatgtcgaaaactaagaatggcattacttgccagaaatggagcagtacttccccacatcgaccgcggttttccccagcaacccacccgtctgagggtctggaagaaaactactgcagaaaccctgacaatgacccgcaaggtccatggtgttacaccactgatcctgaaaagcgatacgattattgtgatatcctcgaatgtgaagaagagtgcatgcattgttcgggagagaattacgacggcaaaatcagcaagactatgtcggggctggaatgtcaagcctgggactcgcagagcccccatgcccacgggtatatcccttccaagtttcctaataagaatctgaaaaagaactactgccgcaatccggaccgcgagctccggccttggtgcttcactactgatccgaataagagatgggaactgtgcgacatcccccgttgtaccactcctcccccgtcgtcaggtccaacctaccaatgcttgaaaggaaccggtgagaactacagggggaacgtggcagtgactgtgtcgggtcatacttgccagcattggtccgctcaaactccacacacccataacagaacccctgaaaacttcccgtgtaagaatctggatgagaattactgcaggaaccctgacgggaagcgcgctccctggtgccacaccactaatagccaggttagatgggagtactgtaaaatcccatcctgtgactcgtcgcccgtctccaccgagcagctggcaccaaccgctccgccggaactcacgcccgtggtgcaagactgctaccacggagacggacagtcctaccgcgggacttcatcgactaccacgaccggaaagaagtgccagagctggtcctcgatgaccccgcaccgacaccagaaaacccctgagaattatcctaacgccggcctcactatgaactactgcaggaatccagatgcagataagggaccgtggtgcttcaccaccgacccaagcgtgcgctgggagtactgcaatttgaagaagtgcagcgggacggaagcgtcagtggtggcgccgccgccggttgtgctcctccctgacgtcgaaactccgtcggaggaagattgcatgttcggaaatggtaagggatatcggggtaaaagagcgaccaccgtcaccggcactccgtgccaggattgggccgcgcaggagccccaccgccattcaatctttaccccagaaacgaaccctagagccgggctcgagaaaaactactgtcgaaaccctgatggcgatgttgggggaccatggtgctataccaccaacccgcggaagctctacgactactgcgacgtgccgcaatgcgctgcgccgtcatttgactgcggaaaaccccaggtggaaccaaagaagtgccccggacgggtcgtggggggttgtgtcgcccacccgcattcatggccatggcaagtgtcgctgcggacccgcttcggaatgcacttctgtggaggcactcttatcagccccgagtgggtcctgaccgccgcacactgcctggaaaagagccctcgcccgtcgagctacaaggtgatcctgggtgcccatcaggaggtcaatctcgagccgcatgtgcaggaaatcgaggtgtctaggcttttcctcgaaccaactcgcaaggacatcgcgctcttgaaactctcatcgcccgcggtcatcacggataaggtcattcctgcgtgcctgccaagcccaaactacgtggtggcagacaggacggagtgcttcatcaccggctggggagaaacccagggaactttcggcgccggtctgctgaaggaggcccagctccccgtgatcgaaaacaaagtttgtaaccgatatgaattccttaacgggcgcgtccaatcaaccgagttgtgcgctggccacctcgctggcggaacggattcgtgccagggcgactcaggcggccccctggtctgcttcgaaaaggacaagtacattctgcagggtgtcacctcatggggcctgggctgcgcacgcccaaacaagccgggagtctacgtgagggtgtcccgctttgtgacttggatcgaaggggtaatgcggaacaac

SEQ ID NO: 250937 - DNA, 2430 bp, synthetic construct
  misc_feature 1..2430: note = Description of Artificial Sequence: Synthetic coding sequence
  source 1..2430: mol_type = other DNA
atggagcataaggaggttgttcttctcctgctccttttccttaagagcggacaaggggaacctctcgacgattacgtgaacactcaaggcgcatccctcttcagcgtcacgaagaagcaactcggagcaggctcgattgaggaatgcgcggcaaaatgcgaggaagatgaagaattcacttgtcgagcgtttcagtaccattccaaggaacaacagtgcgtgataatggcagagaaccgcaagtcatccatcatcatcagaatgcgcgatgtggtgttgtttgaaaagaaagtgtacctctccgagtgcaagactggtaatggtaagaattacaggggaactatgtcgaaaactaagaatggtattacttgtcagaagtggtcgtcgaccagccctcaccggccccggttttcccctgccacccatccatccgaaggacttgaggaaaactattgcagaaatccagataacgacccccaaggaccatggtgttacaccaccgatcctgaaaagcgttacgattactgtgatatacttgagtgcgaagaagagtgtatgcattgttccggagagaattacgatggaaaaatcagcaaaaccatgtccggactcgagtgtcaggcatgggactcgcagtctcctcatgcccatgggtacattccttccaagttcccaaacaagaatcttaagaaaaactactgtaggaacccggatagagaactgaggccctggtgctttactactgacccaaacaagaggtgggagctgtgcgacattcctcgctgtactactccacccccttcaagcggacccacctatcagtgtctcaagggtactggagaaaactaccggggaaatgtggcagtgaccgtgtcagggcacacctgccaacattggtcggcacaaaccccccatacccacaacaggacgcctgaaaactttccctgcaagaaccttgacgagaactactgtagaaaccctgacggaaagagagctccttggtgtcatacgaccaatagccaggtccgttgggagtactgcaagattccttcatgcgacagctcccccgtgtcaaccgaacaactggcaccaacggcaccaccagaacttactccagtggtgcaggattgttaccacggagacggacagtcataccggggtacgtcatcgaccaccaccaccggcaagaaatgtcaatcatggtcctccatgactcctcatagacatcaaaagactcccgaaaactaccctaacgctggccttaccatgaactactgtcggaatcctgatgccgataaggggccttggtgtttcaccactgacccaagcgtacgctgggaatactgtaacctcaaaaagtgctctggtactgaggcctccgtggtggcaccacctcctgtcgtgctcctccccgatgtcgagactccatccgaagaagattgtatgtttggaaatgggaaggggtaccgtggtaaaagagccactactgtcaccggaacgccctgtcaagactgggctgcgcaggaaccacacaggcatagcatctttactccagagactaacccccgcgcaggtctggaaaagaactattgtaggaaccctgacggggacgtgggtggaccttggtgttacactacgaacccacgaaaattgtacgactactgcgacgtgccacaatgtgccgcaccatcctttgactgtggaaagcctcaagtggagccaaagaagtgtcccggtcgcgtggttggaggttgtgtggcgcacccacattcgtggccctggcaggtgagccttagaacgcgctttggtatgcatttttgtgggggaactctgattagcccagaatgggtgctcaccgcagcccactgtcttgaaaagtcgccacggccttcctcgtacaaggtgattctgggcgctcatcaagaggtcaaccttgagccacacgtgcaagaaattgaggtgtcacggctttttcttgaacctacccgcaaggatatagcgcttttgaaactgtcctcgcctgccgtgattaccgataaggtgatccctgcgtgtctgccttcaccaaattacgtggtggcagatcgcaccgaatgctttatcaccggatggggcgaaacccaaggaaccttcggtgccggtctgcttaaagaggcgcagctgcccgtcatcgaaaacaaggtgtgtaaccggtacgaattccttaacggccgcgtgcaatctaccgaactttgtgcaggccatcttgcaggtggcactgactcatgtcagggggattccggaggacccctggtctgttttgagaaggacaagtacatcctgcaaggagtgacttcctggggacttgggtgtgcaagaccgaacaagcctggagtgtacgtgcgagtctcgcgtttcgtgacctggattgaaggggtgatgcggaacaac

SEQ ID NO: 250938 - DNA, 2430 bp, synthetic construct
  misc_feature 1..2430: note = Description of Artificial Sequence: Synthetic coding sequence
  source 1..2430: mol_type = other DNA
atggagcataaagaggtcgtgctcctactgttgttatttcttaagtcaggtcaaggagaaccacttgatgattatgttaatacgcagggcgcatctctgttttccgtgactaaaaaacaattaggggcaggctcaattgaagaatgtgctgcaaaatgtgaggaagatgaagaattcacgtgccgtgcgtttcaatatcatagcaaagaacagcaatgcgtcatcatggctgaaaacagaaagtccagtatcataattcgcatgcgggacgtggtgctgtttgagaaaaaggtttacctgtccgaatgcaaaacaggaaatggtaaaaactacagaggaacgatgagtaaaacaaaaaatggaataacgtgtcaaaaatggtcttcgacatctccgcaccgcccaagattttcgccggcaactcatcctagcgaaggcctggaagaaaactactgcagaaatccagataacgatccgcagggaccatggtgttacacgacggatcctgaaaaaaggtacgactactgcgatatattagaatgcgaggaagagtgcatgcactgctcaggagagaattatgatgggaagattagtaaaacaatgtcaggcttagaatgccaagcctgggactcccagtcacctcatgcccatggttatatcccctcaaaatttccgaataaaaatctgaaaaaaaactattgtagaaatccggatcgcgagctacgtccgtggtgctttacaactgatccaaacaaaagatgggaactgtgtgacatccctcgttgtacgacgcctccgccgtctagcggacctacttatcaatgtttgaagggaacgggagagaattatcgcggcaacgtagcagtcactgtatccggtcatacttgccagcattggtctgctcaaacacctcacactcataatcgtacccccgagaactttccctgcaaaaatctggatgaaaactactgtcgtaaccctgacgggaagagggcaccgtggtgtcatacaacaaattctcaggttcgttgggaatattgcaaaataccgagctgcgatagctcacctgtatcaacagaacaattagccccgacggcgccacccgaactgacccctgtcgtccaggattgttaccacggcgacggacaaagctaccgtggcacgtcctcaacaacgacgacagggaaaaaatgtcagagctggagctcgatgacaccacatcgccatcaaaaaactcctgagaattatccaaacgcgggtctgactatgaactattgtcggaatccggatgctgacaaaggcccatggtgttttacaacagatccgtcagtgcgttgggaatattgtaatctgaaaaaatgcagcggcaccgaggcctctgttgtcgcgcctccacctgttgtgcttcttcctgacgtggaaactccgtctgaggaagactgtatgtttggaaatggaaaagggtatcgaggcaagcgcgcgaccacagtgacgggcacgccatgccaagattgggccgcacaggaaccgcatcgccatagcatcttcacaccggaaacaaatccacgcgccggtctggaaaagaattactgtcgtaacccggacggagatgtgggcggcccttggtgctatacaaccaatcctcgcaaattgtatgactattgtgacgttccacaatgcgccgcaccgtcatttgattgtggcaaacctcaggtcgagccgaaaaagtgccccggccgcgtcgtcggcggctgtgtggctcacccacattcatggccatggcaagtctcactgcgtactcgttttggcatgcacttttgcggtggcacattaatttcgccggaatgggtcttaacagcagcccattgcctggaaaagtctccgcgccctagttcctataaagtcatcctgggagcacatcaggaagttaatctcgagcctcatgtgcaagaaatagaagtgtctcgattatttcttgaaccgacgagaaaggatattgcactgctgaaattatcctcccccgcggttataacagataaggtgataccagcgtgtctgccgtcaccgaattatgttgtggcggatcgcacggaatgctttattacgggatggggagaaacacaaggcacgtttggtgcaggtcttttaaaggaggctcaattgccggtcatcgagaacaaagtttgcaatcggtatgaatttcttaacggccgcgttcagtcaacagaactttgcgcaggtcaccttgccggcggtacagattcgtgtcagggcgattcaggtggcccattagtttgtttcgaaaaggataagtacatactgcagggagtgacgtcatgggggttaggctgcgcccgtcccaataaaccaggagtatatgtaagagtgagccgctttgtgacgtggatcgagggagtcatgcgcaataat

SEQ ID NO: 250939 - DNA, 2430 bp, synthetic construct
  misc_feature 1..2430: note = Description of Artificial Sequence: Synthetic coding sequence
  source 1..2430: mol_type = other DNA
atggagcataaggaggtggttctactcttactcctttttctgaaatctggccagggtgaacccctggacgactatgtgaacacccagggagcaagcctgttttctgtgaccaagaaacaactgggcgctgggtcgatcgaagagtgtgcagccaagtgcgaggaggatgaggaatttacatgccgggcatttcagtaccactccaaagagcagcagtgtgtgatcatggccgagaatcggaaatcctccataatcatccggatgagggatgtcgtcctctttgagaaaaaagtttacttgagcgaatgtaagacaggcaacggcaaaaattatcgagggacaatgagcaagacaaaaaacggaatcacctgccagaaatggtcgtctaccagcccgcacagacctcgcttcagtccagccacccatccttctgagggcctcgaggaaaactactgcagaaatcccgataacgacccccaaggtccttggtgctacaccactgatccagagaagcgatacgattactgcgacattttagagtgcgaggaggagtgcatgcactgtagtggcgagaactacgatggcaagatatccaagacgatgagcggtctggaatgtcaagcttgggattcacagagcccccatgctcacggatacataccatctaagtttcctaataagaatctgaagaagaactattgtcggaacccagacagagagctacggccttggtgttttactactgacccaaataaacggtgggagttgtgcgatatccctcggtgtaccacccctcctccttcatctgggccaacttaccagtgccttaaaggcaccggggaaaattatagggggaatgtagctgtcactgttagcggacacacttgccaacattggtcagcccagacccctcacacacacaatcgcaccccagaaaattttccttgtaagaacctggatgaaaattattgccgtaaccccgacgggaagagggcaccatggtgtcatactaccaactcccaggtgcggtgggaatattgcaagatccccagctgcgacagctcacctgtctctacagagcagctggcccctacagccccccctgaactgacccccgtggttcaggactgctatcacggtgacggccagagttatcgcggtacctcatctaccactactaccggtaaaaagtgccaaagctggagctcaatgaccccgcacaggcaccagaaaactccggagaattatcccaatgctgggttgacaatgaactattgtcgaaatccggacgccgacaaaggtccctggtgcttcacaacagatccatcagtccgatgggaatactgtaatttgaagaagtgcagcgggacagaggcctccgttgtcgctccgccgccggtcgtacttctgccagacgtggagactccatcggaagaggattgtatgttcggaaatggcaagggataccgcggcaagagagccactactgtgactggaacgccctgccaggattgggcagcgcaagaaccccatcgacattctattttcacacctgagactaacccccgggcaggactggagaaaaactactgtagaaaccccgatggagacgtgggcggtccctggtgttacaccacgaaccctcgaaaactctacgactactgcgacgttccccagtgcgccgctcccagctttgactgtggaaaaccccaggttgagcctaagaaatgtcctggcagagtggtcgggggatgcgttgcccatccccatagttggccatggcaagttagtttgcgcaccaggtttggaatgcatttttgcgggggcactcttatctcaccggaatgggttctcacagccgcgcattgtcttgagaaatcacctcgtccgtcttcctacaaggtgatcctcggtgcccaccaggaggtaaacttggaaccccatgttcaggaaatagaggtaagcagactctttttggaacccactagaaaggatattgcgcttcttaaattgtcttcaccggccgtgattactgacaaagtgattcccgcttgtctcccatcacctaattatgtcgtcgctgatagaactgagtgtttcataaccggttggggcgaaacacagggcacctttggcgctggcctgctgaaagaggcccagctgccagtgattgaaaataaagtgtgcaacagatatgaatttctgaacgggcgggtgcagtctactgagctgtgcgcgggacacctggcaggaggaactgactcttgccagggtgactctggaggaccccttgtgtgtttcgagaaagacaagtatatcctgcagggggtgacgtcctgggggctagggtgcgccagaccaaacaagcctggtgtctacgttagagtttctaggtttgtcacctggatagagggggtgatgcgcaacaat

SEQ ID NO: 250940 - DNA, 2430 bp, synthetic construct
  misc_feature 1..2430: note = Description of Artificial Sequence: Synthetic coding sequence
  source 1..2430: mol_type = other DNA
atggagcataaggaagtggtattgctgttactgctatttctgaagagtgggcagggggagccactggacgattacgtaaatactcagggggcttcactgttctctgtcaccaaaaagcagctcggggctgggtctatcgaggagtgtgcggcgaaatgtgaggaggacgaggagttcacgtgtcgcgcctttcagtaccactccaaggagcaacagtgtgtgattatggctgaaaaccgcaaatcctccattatcatccggatgcgggacgtggtcttgtttgaaaagaaggtctacctcagcgagtgcaaaactggcaacgggaagaattatagaggaaccatgagcaagacgaaaaatggaattacttgtcagaaatggagcagtacatcgcctcacagacctcgtttctcccccgccacacatccaagcgagggcttggaagagaactactgtagaaatcccgacaatgacccccagggtccttggtgttataccacggacccagagaaacgctacgattattgtgacattttggaatgtgaggaggaatgtatgcattgcagtggggagaactatgacgggaaaatttccaagactatgtcgggtctagagtgccaggcatgggactctcagtccccccatgcccacgggtatataccttccaagttccccaataagaacctcaagaagaactactgcagaaatcctgaccgagagctccgcccatggtgtttcaccaccgaccctaataagcggtgggagttatgtgatatacccagatgcaccacacctcctcctagctcagggcccacctatcagtgtctcaaagggacgggcgaaaattatagaggtaacgtggccgtgacggtgagcggccacacatgccagcattggtcagcccagaccccacacacacacaatagaactcctgagaacttcccatgtaagaacctggatgaaaattactgccgaaatccagacgggaaacgcgctccttggtgtcatacaaccaattctcaggttagatgggaatattgcaagattccctcttgcgattctagccccgtctctaccgagcagctggccccaaccgcaccacccgaactgactcctgtcgtgcaggactgctaccacggagacggtcagtcataccggggcacctctagcacaaccacaactggaaaaaagtgccaatcttggtctagcatgactccgcaccgccaccaaaagacccccgaaaactaccctaacgcaggccttacaatgaactactgtaggaatccagatgccgacaaggggccctggtgtttcaccaccgaccctagcgttcggtgggaatactgcaatctgaagaaatgcagtgggacggaagcatcagtagttgccccaccaccggtggtgctactgccggacgtggagacaccgtcagaggaggattgtatgttcgggaacgggaagggttacagaggcaaacgggctacaaccgtgaccggtacaccatgccaggactgggctgcacaggagcctcaccgtcattccatattcactccagaaaccaatcctcgtgctggactggagaaaaactactgtcgcaatccagatggtgatgtaggcggcccctggtgttatactaccaatccaagaaagctgtacgattactgcgacgttccgcagtgtgcggcaccgtccttcgactgtggtaagccccaggtggaacccaagaagtgccccggccgggtggtcgggggatgcgttgcgcatcctcactcctggccgtggcaagtttccttgcgaacaaggtttgggatgcatttctgtggcgggacattgatctctccggagtgggtgttgactgctgcccattgcctggagaagagcccacgaccatctagttataaagttatactcggcgctcaccaggaagtcaatctggagcctcatgtgcaggagattgaagtgtctcgcctctttctggagccaacacggaaggacatcgccctgctcaaactctcgtccccagcagtgattacggacaaggtaattccagcgtgtttaccatctccgaattacgtggtggcagaccggacagagtgtttcatcactggctggggtgaaactcagggaacttttggggcaggcctgctaaaagaagcccagctcccggtcatagaaaataaggtgtgcaatcgatacgagttccttaatgggcgagtgcaaagcacagaactttgtgcaggacacctcgcagggggcactgactcttgtcagggggattctggaggtccacttgtgtgttttgagaaggacaagtatattctgcagggtgttacctcttgggggttaggctgtgcacggcccaataaaccaggggtgtatgtgagagtgtcacgcttcgttacctggatcgagggcgtcatgcgaaacaac

SEQ ID NO: 250941 - DNA, 2430 bp, synthetic construct
  misc_feature 1..2430: note = Description of Artificial Sequence: Synthetic coding sequence
  source 1..2430: mol_type = other DNA
atggaacacaaggaggtagttttgctcttgctgctgttcctgaaatccggacagggcgaaccccttgatgactatgtgaacacgcagggggccagtctgttttcagtgacaaagaaacagctcggagccggcagcatagaggagtgtgcagccaagtgtgaagaggatgaagagtttacatgcagggcttttcaataccacagtaaagaacagcagtgtgtaatcatggcagaaaaccgaaagtcatctatcattattaggatgcgcgatgtggtgctgttcgagaaaaaagtttatctcagcgagtgcaagacaggcaacggcaagaattatagaggcacgatgtctaaaaccaagaacgggataacatgccagaagtggagctcaacatctccccatcgccctagattcagcccagccacacatccctccgagggtttggaagagaattactgcaggaatccagacaacgacccccagggcccatggtgttacactacagacccggaaaagaggtacgattactgcgacattctggagtgcgaggaggagtgcatgcattgttcaggcgagaactacgacgggaagataagcaagaccatgtccggtctggagtgtcaggcctgggacagccaaagcccacacgctcacggctatatcccctcaaaatttcctaataagaacctcaagaaaaactactgccggaaccctgacagggagctgcgcccttggtgttttacgactgatccaaataaacggtgggagctgtgtgacattccaaggtgcacaactccaccaccctccagtgggccgacctaccagtgcttgaaaggaactggcgagaactaccggggaaacgtcgcagtcaccgtcagtggccacacgtgtcagcattggtcagctcagaccccgcacactcataatcggacccctgagaattttccctgtaagaatctggatgagaactactgcaggaaccctgatgggaagagagcaccctggtgtcatacaactaacagccaagttaggtgggaatattgtaagatcccaagctgcgactcttctccagtgagtactgaacaacttgctccaacggcccctccagagttgactcctgtggtgcaggactgctaccatggcgacgggcaaagttaccgcgggacaagctcaaccacaacaaccggtaaaaagtgtcagtcctggtctagcatgacaccacaccggcaccaaaagactccagagaactatcccaacgcaggactgaccatgaactactgtagaaacccagacgcagacaaaggtccctggtgctttacaaccgacccttccgtgcggtgggagtactgcaatctcaagaaatgctcaggcaccgaggccagtgtagtagctccccctccggtggtcctgctgccagacgtggagaccccctctgaggaggattgcatgtttgggaacggcaagggctatcggggcaagcgggctactaccgtaactggtacgccatgccaagattgggctgcccaggagccccaccgacacagtatcttcactccagaaacaaaccctcgcgccggactggaaaagaattactgccgcaacccggatggagatgtaggagggccctggtgctacacgaccaacccaaggaaactttatgactactgtgacgtccctcaatgcgcagccccgtcctttgattgcgggaaaccacaggtcgagcccaaaaagtgtccggggagagtggttggcggttgtgtggctcacccccactcctggccctggcaagtttccctgaggacccgattcgggatgcatttctgcggtgggactcttatcagccctgagtgggttttgactgctgcgcactgtctggagaagtcacccagaccaagctcctacaaggtcattcttggcgcccaccaggaggtcaacctcgagccccatgttcaggagatcgaagtaagccggctgtttctcgagcccacacgcaaggacatagcattgctgaagctttccagcccggcagtgattacggataaggtaatacctgcctgcctgccgagccccaactacgtggtcgccgacagaacggaatgcttcattactggctggggcgagacacagggcacatttggcgccgggctgctcaaagaagcgcagttgcccgttatcgagaataaagtgtgtaacaggtacgaattcctcaatggaagggtgcaaagcacggaactgtgtgccggccaccttgctgggggaaccgactcatgtcaaggtgactctggaggacccctggtctgttttgaaaaagacaagtacattctgcagggtgttaccagctggggcttgggctgcgcgcgcccaaacaagcctggtgtgtacgttcgagtttctcgattcgttacatggattgaaggcgtcatgagaaataat

SEQ ID NO: 250942 - DNA, 2430 bp, synthetic construct
  misc_feature 1..2430: note = Description of Artificial Sequence: Synthetic coding sequence
  source 1..2430: mol_type = other DNA
atggagcataaggaagtggtgctgctcttgctgctgtttcttaagtcgggtcaaggagagcctcttgacgattacgtcaatactcagggcgcttcattgttttcagtcactaagaagcagcttggcgccggcagcattgaagagtgtgcagccaagtgtgaagaagatgaagaatttacgtgcagggcattccagtaccactcgaaagaacagcagtgtgtcattatggcagaaaaccggaaatcgagcattatcattcgtatgagagatgtcgtgctgtttgaaaagaaggtctatctttcggaatgtaagaccggaaatggaaaaaactaccggggaaccatgagcaaaactaagaatgggattacctgccaaaagtggtcctcgactagccctcatagaccaaggtttagcccagccacccaccctagcgaaggacttgaggagaactactgtcgtaatcctgataacgatccacaagggccctggtgttacacgaccgatccagaaaagcgctacgactattgtgatatcctcgaatgtgaagaagaatgcatgcactgttcgggtgaaaactacgacggcaagatcagcaagactatgtcgggccttgagtgccaagcgtgggattcgcagagcccccatgctcacggttacattccttccaagtttcctaataagaacctgaagaaaaactactgccggaaccccgacagagaactcagaccatggtgctttaccaccgaccctaacaaacgatgggaactctgcgatatccctagatgcaccaccccgccaccatcttcaggacctacctaccagtgcctcaaagggaccggagagaactaccgtgggaatgtggccgtgaccgtcagcggacatacctgtcagcattggtccgctcagactccacacacgcacaatcgcacgcccgaaaactttccttgcaagaacctggatgaaaactactgtcgaaacccagatggtaagagagcaccgtggtgtcacaccaccaacagccaagtacgttgggagtactgcaaaattccgtcctgcgattcctcaccagtgtctaccgaacaactggccccaacggcgccccctgagcttactccagtggtgcaagattgttaccatggcgacgggcaatcgtatcgaggcacctcgtcgactactacgaccggtaagaagtgtcaatcctggtcgtcgatgaccccacatcggcatcagaaaacgcctgagaactacccaaacgcaggacttaccatgaattactgccggaatcctgacgctgataaggggccctggtgctttactaccgatccatcggttcgctgggagtattgtaacctcaaaaagtgttcgggaaccgaagcctcggtggtggcacccccaccagtcgtgctcctgccggatgtggagactccgtcggaagaggattgcatgtttggtaacggcaagggatacagaggtaaacgcgcgacgaccgtcaccggaactccatgtcaggactgggccgcacaagaaccccataggcactccatattcacccctgaaactaacccacgggcaggtcttgaaaagaactattgtagaaatcctgatggagatgtcggtggtccttggtgctacactaccaacccacggaagctctacgattactgtgacgtgccccaatgcgcagccccgagctttgattgcggaaaaccccaggtcgaacctaagaagtgccctggtagagtggtgggcggctgtgtggcacatcctcatagctggccgtggcaagtgtcgctgagaacccggtttggaatgcatttttgtggaggaactctgatttcgcctgaatgggtgctgacggcagcacactgtcttgagaagagccctcgccctagcagctacaaggtcattctcggcgcccaccaggaagtgaatctcgagccgcacgtgcaagagattgaggtgtcgcggctgtttttggaaccgacccgaaaagacatcgcgctcctcaagctctcatcccccgccgtgattactgacaaggtgatcccggcatgtctgccatcgcctaactacgtcgtggcagatagaacggaatgtttcataaccgggtggggagaaacccaaggtacctttggtgccgggttgctgaaggaggcgcagcttcccgtgatagaaaacaaggtctgtaacaggtacgaatttctgaatgggcgcgtgcagagcaccgagctgtgcgcaggccaccttgctggcggtaccgattcatgtcagggtgatagcggagggcctctggtttgttttgaaaaagataagtacattctgcaaggagtgactagctgggggctcggttgtgctcgaccaaacaagcctggagtctacgtgagggtatcgagattcgtcacctggatcgaaggagtgatgcgcaataac

SEQ ID NO: 250943 - DNA, 2430 bp, synthetic construct
  misc_feature 1..2430: note = Description of Artificial Sequence: Synthetic coding sequence
  source 1..2430: mol_type = other DNA
atggagcataaggaggtggtactgctccttcttctgtttctcaaaagcgggcaaggagaacccctggacgattacgtgaacacccaaggcgcatcgctttttagcgtgactaagaaacaactcggggctggctcgattgaggaatgtgcggcaaaatgtgaagaggatgaagagttcacctgtagggcattccagtaccattcgaaagaacaacaatgtgtgataatggcggaaaaccgtaagagctccataatcatccgaatgcgggatgtcgttctgttcgaaaagaaggtgtacctttccgaatgtaagactggaaatggcaagaactaccggggaacgatgtcaaagacgaaaaatggaattacctgccagaagtggtccagcacgtcaccccatcggcccagatttagccccgcaacccatccaagcgaagggctggaggaaaactactgccgcaacccggataatgatcctcagggtccatggtgctacactaccgatccagagaaaaggtacgattactgtgatatccttgaatgtgaggaggaatgtatgcattgttcaggcgagaactacgacggaaagatctcgaaaaccatgtcaggacttgaatgccaggcatgggattctcagagcccccatgctcacggttacattccttccaaattcccaaataagaaccttaagaaaaactactgtcgtaatccagacagggaactccgtccttggtgttttactacggacccaaataagagatgggaactctgtgatattccaaggtgcactacccctcccccatcctccggtcctacttaccagtgcctgaagggaaccggtgaaaactacagaggaaacgtcgcggtcacggtgtcgggccacacctgtcagcattggagcgcacagacccctcatactcacaacaggactcccgaaaacttcccctgcaaaaacttggatgaaaactattgtaggaaccctgacggtaaacgcgccccgtggtgtcacacgacgaattcgcaggtccgttgggagtactgtaagattcccagctgtgattcgtcgccagtgtcgaccgaacagcttgcgcctactgctccccccgagctgactccggtcgtgcaagattgctaccacggtgatgggcaatcatatcgagggactagctcgactacgactactggtaaaaagtgtcagagctggtccagtatgaccccacatagacatcaaaagacccctgagaactatcccaatgccggtctgaccatgaactattgccggaacccagacgcagacaaggggccgtggtgtttcaccaccgatccgtcagtgcgttgggaatactgtaacctgaagaaatgttcaggtactgaagcaagcgtggtcgcacctccacctgtcgtccttctgcctgatgtggagactccatcggaagaagattgcatgttcggcaacggtaaaggataccgggggaagcgagccactacggtgaccggtactccgtgtcaagattgggctgcacaagaacctcataggcactctatcttcactcctgaaactaatcctcgcgcgggattggaaaagaactactgcaggaacccagatggcgacgtgggagggccctggtgctataccactaacccaagaaagctgtatgattactgtgacgtgcctcaatgtgctgcaccatcatttgactgcgggaaaccacaggtcgaaccgaagaaatgccccgggagagtcgtcggaggttgtgtggcgcaccctcactcctggccctggcaagtgtccctgcggacccgctttggaatgcatttttgtggtggtaccctgatctcaccagaatgggtgcttaccgcagcgcactgtcttgaaaagtcgccacgaccttcatcgtacaaggttattcttggcgcgcatcaagaagtgaaccttgagccacatgtgcaggaaattgaagtctcgcggctgttcctcgagcctaccaggaaggacattgcactgctgaaactgtccagccctgcggtgattactgataaggtgatccccgcatgccttccatcccctaattacgtcgttgcagatcgaactgagtgcttcattactgggtggggtgagacgcaaggaacttttggcgcagggctccttaaagaagcccagctgccagtgattgaaaacaaagtgtgtaatcggtacgagtttctcaacggtagagtgcaatccaccgagctgtgtgcaggccatctcgcagggggcaccgattcgtgccagggtgattccggtggtcctttggtgtgctttgagaaagataagtatattctccagggagtgacttcctggggtttgggctgcgcccgtccaaataagccgggtgtctacgtgagggtgtcgcgttttgtgacttggattgaaggtgtgatgcgcaacaac

SEQ ID NO: 250944 - DNA, 2430 bp, synthetic construct
  misc_feature 1..2430: note = Description of Artificial Sequence: Synthetic coding sequence
  source 1..2430: mol_type = other DNA
atggaacataaagaggttgtactacttcttcttcttttccttaaaagtggacagggtgagccgctcgatgattatgtgaatacccaaggggcctccttgtttagcgttaccaagaagcaattaggagctggcagtatcgaggagtgcgccgccaaatgcgaagaggacgaggaattcacctgcagggccttccaatatcattccaaagagcaacagtgcgtgattatggcggaaaacaggaaatcctcaattattatccgtatgagggatgttgtattgttcgagaagaaggtatacctttcagaatgcaagaccgggaacgggaagaattacagaggaaccatgagcaaaactaagaacggaataacatgtcaaaagtggtcctccacatccccccatcgcccaagattttcaccagctactcacccgtccgagggtcttgaagagaactactgccggaatcctgataacgatccacagggtccttggtgttacaccactgatccagagaagaggtatgattattgtgatatccttgaatgcgaggaggagtgcatgcattgcagtggtgagaattatgacggcaaaatttcaaagactatgtctggcttggagtgccaggcttgggactcccagtcaccgcatgcccacggttatattccctccaaatttcctaacaagaacttgaaaaagaattattgtagaaatccagacagagagttgcgcccgtggtgctttactactgatccgaacaaaagatgggaactttgtgacattccaaggtgtaccaccccccctccttcttcaggtccaacttaccagtgtttgaaaggaacaggagagaattatagaggtaacgtcgctgtcacagtttctggtcatacctgccaacactggtccgctcaaactccacatactcacaaccgtacccctgaaaacttcccatgtaaaaatctggacgaaaactattgtagaaaccctgatggaaaacgagcaccgtggtgccatacaacaaactctcaggtacgttgggagtactgtaagattcctagctgtgattccagtcctgttagtacggagcaactcgcacctacagcccctccagagcttaccccagtggttcaggattgctatcacggtgacggccaaagctatcgaggcaccagcagcacgacaaccactggaaaaaagtgccaaagttggtcatccatgactccccatagacatcagaagacgccagagaactatccgaacgctggattgacaatgaattattgcagaaacccagatgccgataaaggaccatggtgctttaccacagatccatctgttcggtgggagtactgcaatctcaaaaaatgctcggggactgaagcgtctgttgttgccccccctcctgtcgtgttgcttccagacgtcgagaccccgtccgaagaagactgcatgtttggcaatggtaaggggtaccgtgggaaaagggctactactgtaactgggacaccatgtcaagattgggctgcacaagagcctcatcgccacagtattttcactccagagaccaatcctagagcagggctcgagaaaaactattgtaggaacccagatggcgacgtgggaggtccatggtgttatacaacgaacccacgtaagttgtatgactattgtgatgttcctcaatgtgccgctccgagctttgactgcggtaagccgcaggtggaacctaaaaaatgcccaggacgagttgtcgggggatgcgttgcacatccacattcctggccatggcaggtttcacttagaactcgtttcggcatgcatttctgtggtggtactctaatttcaccggagtgggtcctcacagcagctcattgtcttgagaagtctccaagaccatctagctataaggtgatcttgggtgcacaccaagaagtcaatttggaacctcacgttcaagaaatcgaggttagtaggctgttccttgaaccaactcgtaaagatattgctttgttaaagttatcgagtcccgccgtgattaccgataaggtgatccctgcttgccttccctctcccaattacgtcgttgcagaccgaaccgaatgttttataacaggttggggagaaacccaagggactttcggggccggtcttctgaaagaagcacaattgcccgttattgaaaataaagtatgtaataggtatgaattccttaacggtcgtgtccagagcaccgaactctgtgcaggacatcttgctggcggaacagattcgtgtcagggcgactccggcggtcctctagtctgtttcgaaaaggataagtacatacttcagggagtcactagctggggcctagggtgtgcacgaccaaacaagcctggtgtttatgtacgtgtgtctcgatttgttacttggatcgaaggtgttatgcggaacaat

SEQ ID NO: 250945 - DNA, 2430 bp, synthetic construct
  misc_feature 1..2430: note = Description of Artificial Sequence: Synthetic coding sequence
  source 1..2430: mol_type = other DNA
atggaacacaaagaggttgtgctgcttctgctgctgtttcttaaatcggggcagggagagccactggatgattacgtcaacactcagggcgcatccctcttttcggtgactaagaagcaactgggcgcaggatccattgaagaatgtgcagctaaatgtgaggaagatgaggaatttacgtgtcgggctttccagtaccattcgaaggagcagcaatgtgtgatcatggccgaaaatcgcaagtcctcgattatcatacggatgcgggatgtggtgctttttgaaaagaaagtctacctttcggagtgcaagactgggaacggaaaaaactacagaggtaccatgtcaaagacgaagaatggaataacttgtcaaaaatggtctagcaccagccctcatagaccacggttttcgccagcgactcatccctccgaaggactggaagagaactattgtagaaaccctgataatgacccccaaggcccttggtgttacactaccgatcccgaaaagcgatatgactactgtgatattcttgagtgtgaggaagagtgtatgcactgctcgggcgagaactacgacgggaaaatctccaagactatgtctggtttggaatgtcaagcatgggactcccagtctccacatgcacatggatacattccctctaagttccctaacaaaaatctcaaaaagaattactgtaggaaccctgatagggaactgcgaccttggtgctttactactgatcccaacaagcggtgggagctgtgcgatattccacgttgtaccacgcctcctccttccagcgggccaacctaccaatgtctcaaggggacgggggagaattacagaggtaacgtcgcggtcactgtgagcggacacacttgtcaacattggtccgcccaaacccctcatacccacaatcgaacgccagaaaacttcccatgcaagaaccttgatgagaattactgccgcaatcctgacggcaagcgcgcaccttggtgtcataccactaactctcaagttcgctgggaatactgtaagatccccagctgcgactcatcgccggtgtcaaccgaacagctcgcgcctaccgcacctccagaattgaccccagtggtgcaggattgctatcatggtgatggacaatcatacagaggaacctcttcaactaccaccactggtaagaagtgccagtcatggtcatcaatgacccctcacagacaccagaaaactccagagaactaccccaatgcgggacttactatgaactattgccgcaatccagatgccgacaagggtccctggtgttttacgaccgacccctcagtgagatgggaatactgcaatcttaagaaatgctccggtaccgaagcatcggttgtggcccctcccccggtggtgcttctgcccgatgtggaaacgccatccgaagaagattgtatgtttggaaatggaaaagggtatagagggaagcgggccactactgtgactgggaccccttgtcaagattgggcagcccaggagccacataggcattcaattttcactccagagacgaacccacgtgcaggactcgaaaagaactactgtcggaaccccgatggagacgtcggtggcccttggtgctacactacgaacccgcgtaagctgtacgactactgcgacgtcccgcaatgtgcagccccttcgtttgactgtggaaaacctcaggtggaaccaaagaaatgcccaggtagagtggtcggaggatgcgtggcccatcctcattcctggccttggcaagtctcccttcgcaccagattcggcatgcacttttgcggtggtactctcatatctcctgagtgggtgctgaccgcagcgcattgtttggagaaaagcccccgaccgtcatcgtacaaggtgatcctcggagcgcaccaggaggtgaacttggaaccccacgtccaggagatcgaagtgtcgagactgttcctcgaaccaaccagaaaggacattgcccttctgaagctgtcgtcacccgcagtgattaccgataaggtgattccagcatgtctcccatcacctaattacgttgtcgctgacagaactgaatgttttatcactggttggggtgaaactcagggaaccttcggagccgggctgttgaaggaggcacaacttcctgttatcgaaaacaaggtgtgtaaccgttacgagttcctcaacggcagggtgcagagcaccgaactttgtgcaggtcatcttgccgggggtactgactcatgtcaaggtgactccggaggaccacttgtgtgcttcgaaaaagataagtacattctgcaaggagtgacttcgtggggcctcggttgcgcacgaccaaataagccaggagtctacgtccgtgtttctaggtttgtgacttggattgaaggagtcatgcgcaataac

SEQ ID NO: 250946 - DNA, 2430 bp, synthetic construct
  misc_feature 1..2430: note = Description of Artificial Sequence: Synthetic coding sequence
  source 1..2430: mol_type = other DNA
atggagcacaaagaagtagtgttgttgctgctcctgtttctcaaatcaggtcagggtgagccgctggacgactacgttaacacccagggtgcgagcctcttcagcgtgacgaagaaacagctgggtgccggcagtatcgaagaatgcgccgccaagtgtgaagaagacgaggagttcacttgtcgcgcattccagtaccactcaaaggagcagcaatgcgtcattatggcggaaaaccgcaaatcctctattattatacgcatgagggacgtcgtgctgttcgagaagaaggtctacctgagcgagtgtaagaccggtaacggaaaaaactataggggaacgatgagtaagacgaaaaacggaatcacttgccagaagtggtcctccacgtcaccacacagacctagattcagtcccgccacacaccccagcgaaggcctggaagagaactactgtcgcaatccggacaacgatcctcaaggtccctggtgttatactactgatcctgagaaaagatatgattattgcgatattcttgagtgcgaggaggaatgtatgcactgttctggtgagaattacgacggcaaaatctctaagaccatgagcggccttgagtgccaggcgtgggacagccaatcacctcacgcacatggatatattccttcaaaattcccgaataagaatctgaagaagaattactgcaggaaccctgatcgcgagctgcgcccctggtgcttcaccactgacccgaataaacgctgggaactctgcgacattccgagatgcacaaccccccccccatcttcaggacctacctaccagtgtctgaagggaacaggagagaactaccgcggtaacgtagccgttaccgtgtccggccacacatgccagcactggagtgcccagacccctcatacccataatcgcacacccgaaaactttccatgtaagaatttggatgaaaactactgtcgcaacccagatggtaagagggccccttggtgtcacacaaccaatagccaggtgcgctgggagtactgcaagataccctcatgtgactctagtccggtctctaccgagcagctcgccccgaccgcacctccggagcttacccccgtggtgcaagattgctaccacggtgacggacagtcctaccgcggaacgtcttctacaacaactaccggcaagaagtgtcaaagctggtcctcaatgacaccacatcgccatcagaaaacgccagagaattacccaaacgccggtctgaccatgaactactgtcgcaatccggacgcggacaaaggcccctggtgctttaccaccgaccctagcgttaggtgggagtactgcaacctcaagaagtgcagcggtaccgaagcttctgtagttgcacctcctcccgttgtgctcctccccgacgtggaaacgccttcagaggaggactgtatgtttggtaacggtaaaggttatagaggaaagagagccaccacagtcactggaacaccatgccaggattgggccgcgcaggaaccccacagacactctattttcactccggagactaaccccagagctggcctggaaaagaactattgcaggaaccccgacggagatgtgggaggtccctggtgctacaccaccaatcctcgcaaattgtatgactactgtgatgttccccagtgtgccgctccttctttcgattgtggtaaaccccaggtagaaccaaagaagtgccccggacgcgtggtgggaggctgcgttgcccacccccactcatggccttggcaggtgtctctcagaacacgcttcggcatgcatttttgcggtggcaccctgatcagtccagagtgggtcctgacagccgcgcactgccttgaaaagagtccaaggccatcatcctacaaggttatactgggagcccaccaggaggtcaacctggaaccgcacgtgcaggaaattgaagtgtccaggctgtttctggagccaactaggaaagatattgccctcctgaaactgagttcccctgcagttataactgacaaggtaattcctgcctgtctgccaagccccaactacgtggtggccgacaggactgagtgttttatcactggctggggagagacccagggtaccttcggtgcaggcctcctgaaggaagcccagctgccagtgatagagaacaaggtctgcaacaggtacgagttcctgaacggcagggtgcaatctactgagctttgtgcgggccatcttgctggtggtaccgattcatgccagggtgacagtggaggtccactggtttgcttcgagaaggacaagtacatcctgcagggtgtcacatcctggggcctcggctgcgcaagaccaaacaagcccggagtttatgtaagggttagcaggtttgtgacatggatagagggagttatgaggaacaac

SEQ ID NO: 250947 - DNA, 2430 bp, synthetic construct
  misc_feature 1..2430: note = Description of Artificial Sequence: Synthetic coding sequence
  source 1..2430: mol_type = other DNA
atggagcacaaagaagtagtgctccttctcctattgttcttgaaaagtggacagggagaaccacttgacgattacgttaatacacagggcgcatccttgttcagcgtgacgaagaaacagttgggagctggtagcatcgaagagtgcgctgcgaagtgtgaagaagacgaggaattcacctgcagggcgtttcaataccatagtaaagagcagcagtgtgtgatcatggcagaaaacagaaagagctccattataatccgcatgagagatgtggtgctctttgagaaaaaggtctatcttagtgaatgtaagacaggaaatggcaaaaactaccggggcacgatgtctaagacaaaaaacggcattacatgccagaagtggtctagcaccagcccccaccgccccaggttcagcccagccacccatcctagcgaggggctggaggagaactactgcagaaaccccgacaacgatccccaaggcccttggtgctataccacagatcctgaaaaaaggtatgattactgcgatatactcgagtgcgaggaagaatgcatgcattgcagcggagagaactatgacggaaaaatctctaagactatgtctggattagagtgccaggcctgggactctcaatcacctcatgctcacggatatatcccttctaagttccccaacaagaatctgaaaaaaaattactgccgcaacccggaccgggaacttaggccctggtgctttacaacagaccctaataagaggtgggagttgtgcgatatcccacgctgtaccacacctcccccgtcttctggtcctacatatcaatgcctgaaaggaaccggcgagaattaccggggtaacgtggccgtgactgtgagcggacacacctgtcagcattggagtgcccagactccgcacacgcacaatcgcacaccagaaaacttcccctgcaaaaatctcgacgagaactactgcagaaatccagatggcaaaagggctccatggtgccatactacaaacagtcaagttcgctgggagtactgtaaaataccaagctgcgacagctctccagtgagcacagagcagctcgcaccgaccgcacctcctgaacttacccctgtagtgcaggactgctatcatggtgatggtcagtcctaccgcggaactagttcaaccaccaccaccgggaagaaatgccagtcatggtcaagcatgacccctcaccggcatcagaaaactccggaaaattatcctaacgcagggcttacaatgaactattgtagaaacccagatgcagacaaaggcccatggtgcttcacaacagacccgagcgtgcggtgggaatactgcaacttgaagaaatgcagcggaaccgaggccagcgttgtggcacctccaccagtggtcctccttccagacgtggaaaccccatccgaggaagactgtatgttcggcaacgggaaggggtatcgcggtaaaagggctactactgttactggaactccctgccaagattgggcagcccaggaacctcaccggcactctatattcacccctgaaaccaatccacgcgctgggctcgagaagaattactgccggaaccctgacggtgatgtgggcggaccttggtgctacacaacaaaccctcgtaaactttatgattactgtgacgtgcctcagtgtgctgcacccagcttcgattgcggcaagccacaagtggaacctaagaagtgccctggcagagtggtggggggatgcgttgcccaccctcactcttggccatggcaggttagcctcaggaccagatttggaatgcacttttgcggaggtacactgatcagtcctgaatgggtactcactgctgctcactgcctggagaaaagtccgcgccctagcagctataaggttatcttgggagcgcatcaggaagtcaacctcgaacctcatgtgcaagagatcgaggtgagcaggctgtttcttgagcccactaggaaagacatcgctctgcttaagctgtcttctcctgcagtgatcacagacaaagtgattcccgcctgcctaccttctccaaactatgtagtggccgataggaccgaatgcttcatcaccggatggggtgaaacacagggcacatttggcgcaggattgctgaaagaagctcaattgccagtcatagagaacaaggtctgcaacaggtacgagtttctgaatggtagagttcaaagcaccgagttgtgcgccggccatctcgcaggtggaactgacagctgtcagggtgactctggggggcctcttgtctgtttcgagaaggacaagtacatcctgcagggcgtcactagctggggcttgggatgtgcccgcccaaacaaaccgggcgtctacgtgagggtgtcccgttttgtgacctggatcgagggcgttatgaggaacaac

SEQ ID NO: 250948 - DNA, 2430 bp, synthetic construct
  misc_feature 1..2430: note = Description of Artificial Sequence: Synthetic coding sequence
  source 1..2430: mol_type = other DNA
atggagcacaaggaggtcgtactactgttgctgctctttctcaagtcaggtcagggagaacccctggatgactatgtgaacacacagggggcctcactcttttctgttaccaaaaaacagctcggagctgggtccatcgaagaatgtgctgccaaatgcgaggaggacgaggagttcacttgcagagctttccaataccacagcaaagaacagcagtgcgtgatcatggccgaaaaccgcaaaagctccatcatcatcagaatgagagatgtagtgctgttcgaaaagaaggtgtatcttagcgaatgcaaaaccggaaatgggaaaaactaccggggcaccatgtcaaagacaaagaatggaatcacctgtcaaaaatggtccagtacctccccccatcggccgcgcttcagcccagcaacacacccgagcgagggattggaagagaactactgtcgtaaccctgacaacgacccacaaggaccctggtgctatacaactgacccagaaaaacgctacgactactgcgacattctggaatgcgaggaggagtgcatgcactgcagtggcgagaactatgatggtaagatcagtaaaaccatgtcggggctcgagtgccaggcttgggattctcagtcgccacacgcacacgggtacatcccatctaagttccccaataagaacctgaagaagaactactgtaggaatcccgaccgagagcttaggccctggtgcttcaccacagatccaaacaagcggtgggaactctgcgacatccctcgctgtactacaccacctcctagctccggtcctacttaccagtgcctcaaaggaaccggcgagaattaccggggtaatgtagccgtgacagtcagcgggcacacttgccaacactggtcagctcagacgccccacacgcataaccggacccccgagaattttccgtgtaaaaatctggatgagaactattgccgaaatccggacggaaaacgggcgccatggtgccacactacaaatagtcaagtgcgatgggagtattgtaaaatcccttcctgtgacagttctcctgtttctaccgaacagttagctcccaccgccccgccagaactgacccccgtggtgcaagactgttaccacggcgacggccaatcatatagagggacatcgagcacaactacaaccggcaaaaaatgccagtcgtggagctcaatgacaccacacaggcaccaaaagacaccggaaaattatccgaacgcaggcctcactatgaactattgtcgtaaccctgatgccgacaagggtccgtggtgtttcaccaccgatccatcagtcagatgggagtactgtaacctgaagaaatgttccggcaccgaggcttctgtcgtggcccccccgcccgtggttctcctgcctgacgtggagacccctagcgaggaagactgtatgttcggcaacggcaagggatacagaggaaaaagagccaccaccgtgactggtaccccctgccaggattgggctgcccaggaaccccatagacattctatcttcacgcccgagaccaacccccgtgccgggttagagaagaactactgccgcaaccctgatggtgacgttggtggaccctggtgctataccaccaaccctcgcaagctgtatgactactgcgatgttccacagtgcgcagccccttcattcgattgtggaaagcctcaggtagaaccaaagaagtgtcctggtcgagtcgtcggcggctgcgtggcccatccccactcttggccttggcaggtgtcactgcgaaccagattcgggatgcacttttgcgggggcacactcatctcaccagagtgggtgctcaccgccgctcactgcctcgagaaatcccctcggccaagttcttacaaagtaattctcggggcacatcaggaagtaaacctcgaacctcatgtgcaagagattgaggtatcaagactcttccttgaacctacacgtaaggatatcgccctcctgaaactgtcctcgccggctgtcataaccgataaggtgattcctgcctgccttccctccccaaactacgttgtagcagatcgaactgaatgtttcattaccggctggggagaaacacaggggacattcggagccggtctgttgaaggaagcacaactgccagtcatcgagaacaaagtctgcaaccggtatgagttcctgaatgggcgggtgcaatctacagagctgtgcgctgggcatctggccgggggaaccgattcttgccaaggcgattctggaggtcctctggtatgctttgagaaggataaatacattctccagggggtcacttcctggggcctgggctgcgctcgacctaacaagcccggagtatacgtgagagtgtcccgatttgtcacatggattgaaggagtgatgaggaacaat

SEQ ID NO: 250949 - DNA, 2430 bp, synthetic construct
  misc_feature 1..2430: note = Description of Artificial Sequence: Synthetic coding sequence
  source 1..2430: mol_type = other DNA
atggagcataaggaagtggtcctgcttttgctcctgtttctcaagtcgggacaaggggaacctcttgatgattatgtgaatactcaaggggcctccctgttctcagtgactaaaaagcaactcggtgccggaagcatcgaagagtgtgcagcaaaatgcgaagaggacgaagagtttacctgtagagctttccagtaccactccaaggaacaacaatgcgtgattatggccgaaaacaggaaatcgagcatcattatccgaatgagagacgtggtgctcttcgagaagaaagtctacctttcggaatgtaagaccggcaacggaaagaactataggggaaccatgagcaagaccaaaaacggcattacctgccaaaagtggagctcaacctcgccccatagaccaaggttttccccggcaactcacccttccgagggtcttgaagaaaactattgtcgcaaccccgataacgatcctcagggcccatggtgctataccaccgatccagaaaagagatacgattactgcgacatcctcgaatgcgaggaagagtgtatgcattgttcgggagagaactacgacggaaagatatctaaaacgatgtcagggctcgagtgccaggcatgggattcacaatcgccgcacgcccacggctacataccgagcaaatttccaaacaaaaaccttaagaagaactactgtagaaaccctgatcgggagctcaggccgtggtgttttaccacggaccccaacaagcggtgggaactctgcgatattcctcgctgcaccacccctccgccatcatccggccctacttaccagtgtcttaagggtactggagagaattacaggggcaacgtggcagtgactgtgtcaggccacacttgccaacattggtcggcacagaccccccatacccataaccgtactccagagaacttcccttgcaagaatctggatgaaaactactgcaggaaccccgatggtaagagagccccttggtgtcataccactaattcccaagttcgctgggaatactgtaagattccatcgtgtgatagcagcccggtcagcaccgaacagctggcgccaactgcaccacccgagctcaccccggtggtgcaagattgttaccatggagatggtcaaagctaccgcggaacttcgagcactaccactaccggaaagaaatgtcaatcctggtcaagcatgacgcctcacagacaccaaaaaactccagaaaactatccaaacgcaggactcaccatgaattactgtcgtaatccagacgcagacaagggaccctggtgctttaccactgacccatcggtgcggtgggagtactgtaacctgaaaaagtgttccggtactgaagcatccgtggtcgcgccgccgcctgtggtgctcctgcctgatgtggaaactccgagcgaggaggattgcatgtttggtaatggtaagggatacagggggaagcgtgccactaccgtgactggcaccccctgtcaagactgggcagctcaggaaccacatcgccatagcatctttactcccgaaaccaacccaagagccggtctggagaagaattactgtagaaatcccgacggtgacgtcggcggaccctggtgttatacgaccaatccaaggaagttgtacgattattgcgacgtgccccaatgtgctgccccaagttttgattgcggaaagccccaggtcgaaccgaaaaagtgtccaggacgggtggtgggcggatgtgtggcccacccacactcgtggccttggcaagtgagcctgcgcacccgattcgggatgcacttctgtgggggaaccctcatctcgcctgagtgggtcctgaccgcggcacattgtcttgaaaaatcccctcgccctagttcatacaaggtcatactgggtgctcaccaggaggttaacctggagcctcatgtacaggaaattgaagtgtccagactttttctggaaccaactcggaaagacatagccctgcttaaactttccagcccagcagtgatcaccgataaggtgatacctgcctgcttgccatcaccaaattacgtcgtcgccgacaggactgagtgtttcataactggttggggagaaacccaagggactttcggtgctggacttctgaaagaagcacagctgccagtcattgaaaacaaggtgtgtaacagatacgagtttctgaatggacgggtgcaatcgaccgaactttgcgccggacacctggcgggtggaactgattcctgtcaaggagattccggtggaccactcgtgtgttttgagaaggataagtacatccttcagggagtgacgtcgtgggggctgggttgtgcccggcccaacaagcctggtgtgtatgtgagagtgagcagattcgtgacttggatcgaaggtgtcatgaggaacaac

SEQ ID NO: 250950 - DNA, 2430 bp, synthetic construct
  misc_feature 1..2430: note = Description of Artificial Sequence: Synthetic coding sequence
  source 1..2430: mol_type = other DNA
atggagcacaaggaggtggtgctgctcctgctgctgttcctgaagtccggacagggtgagccgctcgatgactacgtgaacacccagggcgcctcgctgttcagcgtgaccaagaagcaactgggagccggatccatcgaggagtgcgccgccaagtgcgaagaggacgaggaattcacttgccgggcctttcaataccactcgaaggaacagcagtgcgtgattatggccgaaaatagaaagtcctcaatcattatacgtatgcgggacgttgtgctgtttgagaaaaaagtgtacctgagcgaatgcaagaccggcaacggaaaaaactacaggggaaccatgtcgaaaactaagaatggaatcacttgtcagaagtggtcgagcactagcccccataggccacggttctcacctgccacccatccttcggaaggactcgaggagaactactgcaggaaccccgacaatgatccacaggggccctggtgttacactaccgacccggagaagcggtacgactactgcgacatcctggaatgcgaagaagaatgcatgcactgttccggcgagaattacgacggaaagatctcgaaaaccatgtccggcctcgagtgtcaagcctgggactcacagtcaccacatgcacatggctacattccctcgaagtttccaaacaagaacctcaagaaaaactattgcagaaaccccgatcgcgagctcagaccttggtgttttactacggatcctaacaagcggtgggagctgtgcgatatcccgcgctgtactacgcctccgccgagctcagggcccacctaccagtgcctcaagggaaccggagaaaactaccgcggtaacgtcgcggtgaccgttagcggacacacgtgccagcattggtctgcccagacgccacacacccacaacaggacccccgagaatttcccgtgtaagaatctcgacgagaactattgtagaaatccagacggaaaacgagctccttggtgccataccaccaattcccaggtccgctgggaatactgcaagatcccgtcgtgcgattccagtccggtgtcgaccgagcagctggcaccgacggctccgcccgaactgaccccagtggtgcaggactgctaccatggcgatggacagtcctaccgcggaacttcgagcactactaccaccggtaagaagtgccagagctggtcaagcatgactccacaccgtcatcaaaagactccggagaactacccaaacgcagggctcaccatgaattactgccggaatcccgatgcggataagggaccgtggtgctttaccaccgatccgtcggtaaggtgggagtactgtaacctgaagaagtgctcgggaactgaagcgagcgtcgtggcaccgccgccggtcgtgctgctcccggacgtggaaaccccgtcggaagaagattgcatgttcggcaatgggaagggctaccggggcaaacgcgccaccaccgttacgggtactccatgccaggattgggcagcacaggaacctcatcggcactccatcttcacgccggaaaccaatccaagagcaggactcgagaagaattactgcagaaaccctgatggcgacgtggggggaccctggtgctataccactaatccacggaaactgtacgattactgtgacgtgcctcaatgcgctgcaccatcattcgattgcggcaagccacaggtggagccaaagaaatgcccgggaagagtggtcggtggctgcgtggcccatcctcattcttggccttggcaagtttcactgcggactagattcggaatgcacttctgcggaggcacgcttatttcaccggagtgggtgcttacggcagcgcactgcctggagaaaagcccgcggccgagctcatacaaggtgatcctgggtgcccatcaggaggtgaacctggaaccacatgtgcaggagattgaggtgtcgaggctcttcctggaaccaactcgcaaagacatcgcgttgctcaaactgtcgtcacctgccgtgatcaccgataaagtcatcccagcctgcctgccctcgccgaactacgtggtggccgaccggaccgaatgtttcatcaccggatggggtgagactcaggggacgtttggagcaggactcttgaaagaggcccagctccctgtgattgagaataaagtgtgcaatcgctatgagtttctgaatggacgagtgcagtcaaccgagttgtgcgcaggccaccttgcgggaggcactgacagctgccagggagattccggaggcccgctggtctgtttcgagaaagacaagtacatccttcagggagtgacttcgtggggcctgggctgtgcgcgcccaaacaagcctggggtctacgtgcgggtgtccagattcgtcacttggatcgagggcgtgatgcgcaataat

SEQ ID NO: 250951 - DNA, 2430 bp, synthetic construct
  misc_feature 1..2430: note = Description of Artificial Sequence: Synthetic coding sequence
  source 1..2430: mol_type = other DNA
atggaacataaggaagtcgtccttcttcttctgctgttcttgaagagcggccaaggcgagccgctggacgattacgttaacacccaaggcgccagcttgttcagcgtgaccaagaagcagctgggtgcaggttccatcgaagaatgcgcggcaaagtgtgaagaggatgaagaatttacttgtcgcgccttccaataccattcaaaggaacaacagtgcgtcattatggcagaaaatagaaagtcgtcaatcattattcggatgagagacgtggtgctgtttgaaaagaaggtgtacctgagcgagtgtaagaccggtaatggcaaaaactacagaggtactatgtccaagaccaagaatggaattacctgtcaaaagtggtcctcaaccagcccacaccggccacgcttttcaccagcaacccatcctagtgaagggctggaagagaactattgcagaaaccctgataatgatccacaaggcccatggtgctacactaccgatcccgaaaagagatacgactattgcgatatcctcgaatgcgaagaagaatgtatgcattgctcaggggaaaactacgatgggaagataagcaaaaccatgtcaggacttgaatgtcaagcatgggacagccagtcgccacatgcacacggttacataccctccaaatttcctaacaagaatctcaagaaaaactactgcaggaacccagatcgggaacttcggccttggtgtttcactactgacccgaataaacgttgggaactttgtgatataccacggtgcaccactccaccaccgtcgagcggacctacctaccagtgtctgaagggaactggtgaaaactatcgcggaaatgtcgcagtcacggtgagcggacatacttgccaacactggtccgctcagaccccacatacgcacaaccgcactccggagaactttccctgcaagaacctggatgagaactactgtagaaacccagacggtaagagagcaccgtggtgccatactaccaacagccaggtccgttgggagtactgtaagatcccttcctgtgatagctcacccgtctcgacggagcaactggcacctactgcacccccagaacttaccccagttgtgcaagattgctaccatggggacggacagtcctaccgcgggacttcatcgaccaccactaccggaaagaagtgtcaatcgtggagctctatgaccccccatcgacatcaaaaaaccccagaaaactacccaaacgccggactgaccatgaactactgtcggaatccagacgctgacaaggggccctggtgttttactactgatccttccgtccggtgggaatactgcaacttgaagaagtgctccggtaccgaggcgagcgtcgtggcacctccacccgtggttttgctcccagacgtggaaactccttcagaggaggattgtatgtttggcaatggaaagggataccgggggaagagggcaactacggtgactggtactccttgtcaagactgggccgcacaagagccacacaggcattcgattttcactccggaaaccaatcctagggcgggactggaaaagaactattgccgtaatcctgacggggatgtgggtggcccatggtgttatacgaccaatccgcggaaactttacgactactgtgatgtgcctcagtgtgcggcaccttccttcgactgtggaaaacctcaggtggagccgaagaaatgcccaggacgagtggtggggggatgcgtcgcccatcctcactcctggccttggcaagtgagcctgcggactcggttcgggatgcacttttgtggaggaactcttattagccctgaatgggtcctgactgcggcacattgcctcgagaaatccccacgcccctcatcgtacaaagtgattcttggggcacaccaggaggttaaccttgaaccacatgtgcaggaaattgaggtgtcgcgccttttcctggagccaacccggaaggatattgctctgcttaaactttcgtcccctgctgtgattactgataaagtcattccagcctgcctgccttcacctaactacgtggtggccgatcgtactgaatgctttatcactggatggggcgaaactcagggtacttttggcgcaggtttgcttaaggaagcacaactgccagtaatcgagaataaggtgtgtaaccggtatgaatttctgaacggcagagtccaatccaccgaactttgcgcgggtcatcttgcaggaggcactgatagctgccagggtgactccggagggccacttgtgtgctttgaaaaagacaagtacattctccaaggtgtgacctcctgggggctcgggtgtgcgcggcctaacaaacctggggtgtacgtgcgagtgagccggttcgtgacgtggattgaaggtgtcatgaggaacaac

SEQ ID NO: 250952 - DNA, 2430 bp, synthetic construct
  misc_feature 1..2430: note = Description of Artificial Sequence: Synthetic coding sequence
  source 1..2430: mol_type = other DNA
atggagcacaaggaagttgtgctgcttctgcttctgttcctgaagtccggacaaggcgaaccgctcgatgattacgtcaacactcaaggtgcatcgcttttttcggtcaccaaaaagcaactcggagcagggtccatcgaagaatgtgcagcaaagtgcgaagaggatgaagaatttacttgtagagcgttccaataccactcaaaggagcagcaatgtgtgattatggcagaaaacagaaagtcgtcgatcatcattcgcatgcgcgatgttgtgctgtttgagaaaaaagtgtacctctccgaatgcaagaccggtaacggaaaaaactataggggaacgatgagcaagactaaaaacggaattacctgccaaaagtggtcaagcacctcccctcatagaccgcggttttcgcctgcgacccatccatccgagggtttggaagagaactattgtcgaaacccagataatgacccccaaggaccctggtgttacacgacggatcccgagaagaggtatgattactgtgacattcttgagtgtgaagaggagtgcatgcattgttccggtgagaattacgatggaaaaatctccaaaactatgtcggggctcgaatgccaagcatgggattcacaaagcccgcacgcacatggatacatcccttccaagtttcccaataagaacctgaagaagaactactgtaggaatcccgatcgagaacttcgcccttggtgcttcacgaccgatcctaacaaacggtgggaactttgtgatatcccaagatgtaccacgcctcccccatcctcagggccgacttaccaatgcctgaaaggtactggagaaaactaccgtggaaacgtggcggtgaccgtgagcggacacacttgtcaacactggtcggcccagactccacacacccataatcgtactccagaaaactttccgtgtaagaatctggacgaaaactactgtcggaaccctgacgggaaaagggcaccatggtgtcacactaccaactcacaagtgagatgggaatactgcaaaattccaagctgtgactcctctcctgtgagtaccgaacagctcgcccctaccgccccgcctgaacttactccggtagtccaagattgttaccacggcgacggacagagctacagaggaacctcatcgactactaccactgggaagaagtgccagagctggtcctcgatgacccctcataggcatcagaaaacccctgaaaactacccgaacgcaggccttacgatgaattactgcaggaacccagacgcagataaagggccttggtgttttaccaccgatcctagcgtgaggtgggagtactgcaatctgaagaagtgttcgggaactgaggcgagcgtggtggcaccacctcctgtggtgctgctgccagatgtggagactcctagcgaggaggattgcatgtttgggaatggtaagggataccgcggcaagcgcgcgacgactgtgactgggacgccgtgccaggattgggcagcccaagagcctcaccgtcatagcattttcacgccagaaactaaccctcgcgcaggactggaaaagaactactgcagaaatcccgatggcgatgtcggcggaccgtggtgttatactaccaaccctcggaaactttacgactactgcgatgtgccacaatgtgcagcaccatcatttgactgtggtaagccccaggtcgagcctaagaagtgcccagggcgtgtcgtcgggggatgtgtggcacatcctcactcctggccatggcaggtcagtctccgtaccagatttgggatgcatttttgtggaggaaccctcatctcgccggaatgggtgctgaccgcagcacactgtctggagaagtcacctcgcccatcgtcttacaaggtcattctgggggcacaccaggaagtgaacctcgagcctcatgtgcaggagatagaagtgtccagactcttcctggaacccacccgaaaggacattgctcttctcaaactctccagccccgccgtgataaccgataaagtgattcctgcgtgtttgccaagcccgaactacgtggtggcagaccgtactgaatgcttcattaccggatggggggaaacgcagggaacctttggtgcaggtctgttgaaggaagcacagcttccagtcattgagaataaggtgtgcaatcgttacgagtttcttaatggtcgagtccagtccacggaactttgtgcaggacatcttgcgggtgggaccgattcttgtcagggcgattcgggaggtcctctggtctgctttgagaaagataagtacattctgcaaggcgtgacctcctggggactgggatgtgcacggccaaataagccaggagtgtacgtccgcgtgagccggtttgtcacctggatcgaaggcgtcatgcgtaataac

SEQ ID NO: 250953 - DNA, 2430 bp, synthetic construct
  misc_feature 1..2430: note = Description of Artificial Sequence: Synthetic coding sequence
  source 1..2430: mol_type = other DNA
atggagcacaaggaagtggtgcttctccttcttctgttcctcaaatcgggccagggagagccacttgacgattacgtcaacacccaaggcgcatcgctcttctccgtgaccaaaaagcagctgggagcaggatcgatcgaagagtgtgccgcgaaatgtgaagaggatgaagaatttacttgtcgggcctttcaataccattccaaggaacagcaatgtgtgattatggcggagaaccggaaatcctccatcatcattaggatgcgggacgtcgttctgtttgaaaagaaggtgtacctttctgaatgcaaaaccggaaacggaaaaaactacagagggacgatgtccaagaccaagaatgggatcacttgtcaaaagtggtcgtcgacgtctcctcaccggcctcgcttttccccagccactcatccgagtgaaggcctggaggagaactattgcagaaaccctgacaacgaccctcaggggccctggtgttacacgaccgatcccgaaaagcggtatgactactgtgacatccttgaatgcgaggaggaatgtatgcactgtagcggggagaattacgatggcaagattagcaaaacgatgtcgggtctggaatgccaagcatgggattcacaatctccacatgcacacggttacatccctagcaagttccctaacaagaacttgaaaaagaattactgtcgcaacccagacagagaactcagaccatggtgttttactaccgatcctaacaaacgatgggaactgtgtgatattccaagatgcacgaccccacctccctcctcaggtccgacttaccaatgtcttaagggtaccggtgaaaactaccggggtaatgtggccgtgaccgtgtcgggacacacctgtcagcattggtcagctcaaactccgcatactcacaatagaaccccagagaatttcccgtgcaagaatcttgatgagaactactgtcgtaacccagatggcaaaagagcaccttggtgtcacaccactaattcgcaggtgcgttgggaatactgcaaaattccatcttgtgattcctcgccagtctcgactgagcagctcgctccaaccgcacccccggaactcacccctgtggtgcaggattgctaccatggagacggacaaagttacagaggaacctcaagcacgactactaccggaaaaaagtgtcaatcctggtcctccatgaccccccatagacatcaaaagactccagaaaactatccaaatgccggactgaccatgaactactgcagaaatcccgatgccgacaaaggtccttggtgctttaccacggatccttcggtgcgctgggaatattgtaatctgaagaagtgttccggcactgaagcatcagtcgtcgccccacctcctgtagtgctgctgccggatgttgaaacccctagcgaggaagattgtatgtttggcaatggcaaaggctatcggggtaaacgggcaaccaccgtgacggggactccttgccaagactgggcagcacaggaaccccaccggcattcgatctttactccagagacgaatccgcgcgcgggactggagaagaactactgtagaaacccagatggagacgttggaggcccatggtgttacaccacgaatccacggaagctgtacgactactgtgatgttccgcaatgtgcagcaccctcgtttgactgcggaaagccccaggtggaacccaagaaatgtcctggaagagtggtgggcggttgcgtggcccatcctcactcgtggccttggcaggtgtccctgaggacccgattcggtatgcatttttgcggtggaacccttatttcaccagagtgggtgctcactgccgcccattgtctcgagaagtccccaagacctagctcatacaaggtgatcttgggcgcccaccaggaggtgaaccttgagcctcatgtgcaggagattgaagtctcacggcttttcctggaacctactagaaaggacattgcactgctgaaactttcgtcccccgcagttataaccgacaaagtgatccctgcgtgcctcccttcgccgaattatgtggtggcagatcgcactgagtgttttatcactggatggggggaaactcaagggaccttcggggcaggccttcttaaggaggcacagctgcctgtgattgaaaacaaggtctgtaatagatacgaatttctgaacggacgcgtgcaatccaccgagctctgtgcaggccacctggccggaggtactgatagctgtcagggagatagtggtgggcctcttgtgtgcttcgaaaaggataagtacatcctgcagggagtgacttcatgggggctgggttgtgcacgaccgaacaagcccggtgtgtacgtgcgcgtgtcccgctttgtgacttggatagaaggagtgatgcgtaataac

SEQ ID NO: 250954 - DNA, 2430 bp, synthetic construct
  misc_feature 1..2430: note = Description of Artificial Sequence: Synthetic coding sequence
  source 1..2430: mol_type = other DNA
atggagcacaaggaagttgttctactgctactcttgttccttaagtcaggtcagggtgaacctctggacgactatgtcaatacacagggggcatcacttttctccgttaccaaaaaacagctgggcgccggaagtatcgaggagtgtgctgctaagtgcgaggaggatgaagagtttacttgtcgtgcttttcagtaccattcaaaggaacagcagtgcgtcattatggccgaaaacagaaagagctccatcatcatcaggatgagggacgtagtgctgtttgagaagaaagtgtatttgtctgaatgcaagacagggaatgggaagaactatcgaggcacgatgagtaaaaccaagaacggaataacttgtcaaaagtggtcatcaacatcccctcatcgaccgcggttctcccctgcaacgcatcctagcgaaggcttggaggagaactactgtagaaatcccgacaatgatccacaggggccctggtgctatacaacagatcctgagaagcggtacgactactgtgacattctagagtgcgaagaggaatgcatgcactgctctggcgaaaactacgacggtaagattagtaagactatgtcggggctggagtgccaggcttgggactctcagtccccgcacgcacatgggtacatcccgagtaagtttcccaataagaatctgaagaaaaactattgtagaaacccagacagggagctacgcccgtggtgctttacaactgatcccaacaaaagatgggaattgtgcgatatcccacgctgtaccacacccccaccttcttctgggcccacttatcagtgtcttaaaggcacgggggaaaattatagaggaaatgtcgctgtgactgtgtcaggccacacctgtcaacactggtccgctcaaactccccacacccataataggacccctgaaaactttccatgcaaaaatctggacgagaattattgccggaacccagacggaaagcgagccccatggtgccacacaacgaatagccaggtccgctgggaatattgtaagattccctcatgtgatagctctccagtctcaaccgagcagctggcacctacggcgcctcccgaacttactccagtggtgcaggattgttaccatggggacggccagagctaccgaggaacttcatctaccactaccacggggaagaagtgtcagtcatggagcagtatgaccccgcaccgccaccagaagacccccgaaaactaccccaacgctggccttactatgaactactgtcgtaacccggacgccgacaaaggcccctggtgcttcacgacagacccaagtgtgagatgggagtactgcaatctgaagaagtgcagtggaacggaggctagcgtggtggccccaccacccgtcgttctgctacccgatgtggaaaccccaagcgaggaggattgcatgttcggcaacgggaagggctaccggggtaagcgcgccaccacagtgacgggtactccatgccaagactgggccgcccaagagcctcacaggcatagcatcttcacacccgagactaatcctagagccgggctcgagaaaaactactgcaggaatcccgatggggatgtgggtgggccttggtgttatacgaccaaccctagaaagttatatgactactgtgacgtgcctcagtgcgcagccccctcatttgattgtgggaagccccaagtggaacccaaaaagtgccctggacgggtcgtgggcgggtgcgtcgctcatccacacagctggccatggcaggtatcgctgaggacacggtttggcatgcatttttgtggggggaccctgatcagtccggagtgggtactaacagctgcacattgcctggagaaaagccctcgtccatcatcctataaggtgatacttggggcacaccaagaggtcaaccttgaaccccacgtacaggagatcgaggtgtcccgattattcctcgagccaaccaggaaggatattgccctgctcaagctttctagtccggctgttatcaccgataaggtcattcctgcatgcctgccttcccctaattacgtggtggctgatcggacagaatgctttattacaggttggggcgagacacagggaacattcggggcaggcctgttaaaagaggcacaactccccgtcatagagaacaaggtatgtaaccggtacgagtttctgaatgggcgcgttcaatctacagagctgtgtgccggccatctggccgggggtacagattcatgtcagggagattccggtggccctttggtgtgctttgagaaggacaaatacatcctccagggggtcacctcctggggactgggatgtgcccgccctaataaacccggggtgtacgtgcgggtttctcggttcgtgacttggatcgagggcgtaatgaggaacaat

SEQ ID NO: 250955 - DNA, 2430 bp, synthetic construct
  misc_feature 1..2430: note = Description of Artificial Sequence: Synthetic coding sequence
  source 1..2430: mol_type = other DNA
atggagcacaaggaagtggtgctgttgctcctcctgtttttaaaaagtggacaaggtgagccactggatgactatgtgaacacacagggagctagcctgtttagcgtcaccaaaaaacaactgggcgccggttctatagaagagtgtgccgcaaagtgcgaagaagatgaagagttcacctgccgcgctttccaatatcacagtaaggaacagcagtgtgtgatcatggcggagaataggaaatcatccatcataattagaatgagggatgtggtgttattcgagaaaaaagtctacctctctgaatgtaaaacaggaaacggtaagaactacagggggaccatgtcaaagactaaaaacggcatcacctgccaaaaatggtctagtactagccctcataggccccgcttcagcccagcgacgcatccttcggaaggtctggaggagaattattgcagaaatcctgacaacgacccccagggcccttggtgctatacaactgatccagagaagagatatgattattgcgatatacttgagtgcgaggaggagtgcatgcactgttcaggagaaaattacgatggcaagatttcaaaaaccatgagtggtctggaatgtcaggcttgggactcacagtccccccacgctcatgggtatatccccagcaagttcccaaacaagaatctcaaaaagaattactgtagaaatccagatagggaactacgcccctggtgcttcactactgatcccaataaaaggtgggaactctgtgacataccgcgctgcaccacacctccgccatcatctgggcccacataccaatgtcttaagggtacaggtgaaaattatcgagggaacgtggccgtgaccgtgagtgggcacacttgccagcactggagtgcccaaacccctcatacacataatagaaccccggagaacttcccctgcaaaaatcttgacgaaaactactgcagaaacccagacggaaagagagctccatggtgtcacacaacgaatagccaggtgagatgggaatattgtaagatcccatcatgcgatagtagccccgtatcaacagagcagttagcccccaccgctcctcccgagctgacacctgtggtgcaggattgttatcatggggacgggcagtcctatagagggacctctagcacaacgacgaccggaaagaaatgtcaatcctggtcttcaatgacgccccataggcaccagaaaacccccgagaactatccgaacgcaggactgaccatgaattactgtcgaaacccagacgctgacaaggggccttggtgtttcacaaccgatccctccgtgcggtgggaatactgcaatctgaagaagtgtagtggtactgaggcctccgtggtggcgccccctccagtcgtgttactgcctgacgtggaaacaccctccgaggaagactgcatgtttgggaacggaaagggatacagaggaaagcgggcgacaaccgttaccggcacgccctgccaggactgggcagcacaggaacctcataggcattctattttcacgcccgagaccaacccacgcgccgggttggagaagaattattgtcgcaaccctgatggggatgtgggagggccttggtgttataccaccaatccgcgcaagctgtacgattattgtgacgtgcctcagtgcgctgcccctagttttgattgcgggaagccccaagtggagcccaagaagtgcccgggaagagttgtggggggatgcgttgcccacccccactcgtggccttggcaggtgagtctccgcactcggttcggtatgcacttctgtggtggcactctgatctcaccagaatgggtcttaaccgcagcccactgcctggaaaagtcacctcgcccatccagctacaaagtgatcctgggagcacatcaggaggttaatctcgaacctcatgtgcaggaaattgaggtaagccgcttgtttcttgaacccaccagaaaagatattgcactgctgaagctttcctctcccgcggtgatcacggacaaagtcatccccgcctgtctgccatcaccaaactatgtggttgctgatcgcaccgagtgctttattactgggtggggggagacacagggtacatttggtgccggtctattgaaagaggctcagctgccggtaatcgagaataaagtctgtaatcgttacgaatttctgaatggtcgggtccagtccacagaactgtgcgcggggcacctcgctggggggacggatagctgccagggcgacagcggaggtcctctagtttgcttcgaaaaagataaatacatacttcagggtgttacctcatggggcctcggctgtgcaaggcccaataagccaggcgtatacgtacgcgtcagccgcttcgtgacgtggattgagggcgttatgaggaataac

SEQ ID NO: 250956 - DNA, 2430 bp, synthetic construct
  misc_feature 1..2430: note = Description of Artificial Sequence: Synthetic coding sequence
  source 1..2430: mol_type = other DNA
atggagcacaaggaagtggttttgctgctgctgttattcctgaagagcggccagggcgagcccctggatgactacgttaatacacagggtgcatctctgttctccgtgaccaagaagcagctcggggccggctccatagaagagtgcgccgcaaagtgcgaagaggatgaagagtttacgtgtcgcgcctttcagtatcactccaaagaacagcaatgtgtcatcatggcggagaacaggaagagctctatcataatccgcatgagggacgtggtattattcgagaagaaagtgtatctcagcgagtgtaaaaccggaaacggaaagaactaccgaggaactatgagcaagacaaaaaatggtataacctgtcaaaagtggagttccacttcacctcatcggccccgcttctcaccagccacccatccctccgaaggacttgaagagaattactgccgcaacccggataacgacccacaggggccgtggtgttacaccaccgaccccgagaagaggtacgattattgtgatatcctcgagtgtgaggaggagtgcatgcactgctctggtgagaattacgatggaaagatatccaagacaatgagtggactggagtgccaggcctgggacagccagtcaccacacgctcacggttatattccgagtaagttcccgaataagaatcttaagaagaactactgcaggaaccccgaccgtgaactccgcccttggtgcttcaccacggatcccaacaaaaggtgggagctgtgtgatatcccaagatgcaccactccacctcctagctccggcccaacctaccaatgcttgaagggcacgggtgagaattatagggggaacgtggcggtgactgtcagtggccatacctgccaacactggagcgcccagacacctcatacccacaatcggacccccgagaacttcccctgtaagaatctcgacgaaaactattgtcgcaaccctgatggtaaacgcgcgccttggtgtcacactaccaacagccaggtccgctgggagtactgtaagatcccaagctgcgattcttcgccggtttctaccgagcagctggcacccactgccccacccgagctgacccccgtcgttcaggattgttaccacggggatggacaatcgtaccgcggcactagttccacgacgacaacaggcaagaaatgtcagtcatggagtagtatgacccctcacaggcatcagaaaacgccagagaattaccccaatgctggccttaccatgaattactgcaggaaccctgatgcagataaggggccttggtgtttcaccacagatccctctgttcgctgggagtattgtaacctcaagaagtgtagcggtacagaagccagcgtcgtcgcgcccccaccagtcgtccttcttcctgacgtggagaccccctccgaggaagactgcatgtttggcaatggcaagggttatcgtggaaagcgagccacaacagtcacgggcacgccgtgtcaagactgggctgctcaggaaccccatcgccatagtatctttactccagaaactaatccaagagcaggactggagaagaactattgccggaatccggacggggacgtggggggaccttggtgctatactactaatccccgaaaactatatgattactgcgatgtgccccagtgtgcagctcccagcttcgattgcggcaaaccacaggttgaaccgaagaagtgtccaggtagagtggtgggcggctgtgtcgctcaccctcactcttggccatggcaagtgagccttcggacaagatttggcatgcatttttgtggtgggaccttaatttcacccgagtgggttttaaccgccgcgcactgcctggagaagagtccccggcccagcagttacaaggtaatcctaggggcccaccaggaggtgaacctggaaccacacgtgcaggagatcgaggtgagtcgattgttcttggagcccaccaggaaagatatcgccttgctcaaactgtcatctcctgccgtgattacagataaagtcatccccgcctgccttccctctccgaattacgttgtggccgatcggacagagtgttttatcaccggttggggggagacccaggggacctttggagctgggcttcttaaagaggcccagctgcccgtcattgagaacaaagtgtgcaaccggtatgaattcctcaacggtagagtgcagtcaaccgagttgtgtgccggtcatttggccgggggcactgattcgtgccagggtgactcaggcggtccgctggtgtgcttcgaaaaagataagtatattttacagggggtgaccagctggggcctggggtgcgcaagaccgaacaaaccgggcgtatatgtgcgggtgtccagatttgttacatggattgaaggagtgatgcgcaacaac

SEQ ID NO: 250957 - DNA, 2430 bp, synthetic construct
  misc_feature 1..2430: note = Description of Artificial Sequence: Synthetic coding sequence
  source 1..2430: mol_type = other DNA
atggagcataaggaagtggtgctgctgctactactgttcctaaagtccgggcagggcgagccccttgatgattacgtgaatacacagggggcttctctattctctgtgaccaaaaaacagctcggcgccggcagtatcgaggagtgcgccgccaagtgtgaggaggatgaggagttcacctgtagggccttccagtatcattcaaaggagcagcagtgcgtcatcatggcagaaaacaggaaatcttctattatcatcaggatgagagacgtggtgctgttcgaaaagaaggtgtacctgtctgaatgcaagacaggcaatgggaaaaactaccgcggaaccatgtccaaaacaaaaaatggcatcacatgccagaagtggtcctctactagtccacacaggcctcggttcagtcccgccacccacccttccgagggcctggaggagaattattgtaggaatcctgataatgacccccagggcccttggtgctatactacagacccggaaaaacgctacgattattgtgacattttggagtgcgaggaggagtgcatgcactgctcaggggagaattatgatggaaaaatatctaagactatgagcggtctcgagtgtcaggcatgggactctcagagcccccatgcccacggctacatcccttctaagttccctaacaagaatttaaagaagaattactgccgaaaccccgatagggagttgagaccatggtgtttcactacagacccaaacaagaggtgggaactgtgcgacatcccccgttgcaccacccctcccccaagcagtgggcccacataccagtgtctcaagggaaccggcgagaattaccgggggaacgtagccgtgaccgtgtctggccatacatgccagcattggagcgcacagactccacacacccacaatcggacccccgagaatttcccatgcaagaatctggatgaaaactactgcagaaacccagatggaaagcgcgcaccctggtgccacacaaccaatagccaggtgcgatgggaatactgcaagattcctagctgtgatagttctcccgtgtccaccgagcagctcgctcctactgctccccccgagctgacacctgtggttcaggattgttatcacggagacggccagtcctatcggggcacttccagcaccaccacaacagggaaaaaatgccagagttggagtagcatgacaccccatcgccaccagaagacccctgagaattatccaaacgctggcctcactatgaactattgtcgaaatcctgatgcagacaaaggcccatggtgttttacaaccgatccttccgtacggtgggaatactgcaacctcaaaaagtgttcaggtactgaggcttccgtggtagcaccgccccctgtggttctgttacctgatgtcgagactccatccgaggaggactgtatgtttgggaatggtaaaggctaccgtgggaagagagccacaactgttacaggcaccccatgccaggactgggccgcccaagaaccccataggcatagtatctttacccccgagaccaaccccagagccgggctggaaaaaaactactgccggaatcctgatggcgatgtcggcggtccttggtgttacaccaccaatccacggaaactgtatgattattgcgatgtcccacagtgtgcagctcctagcttcgattgtggaaaaccacaggtcgaaccaaaaaaatgtcctggtcgcgtggtgggcggctgcgtcgcacatcctcactcttggccatggcaagtgagtctgaggacacggtttggtatgcacttctgcggcgggacactgatctctcctgagtgggtattgacagctgctcattgcctggaaaagtcaccacgccctagctcatataaggtaattttgggcgcccatcaggaagtgaatctggagccccacgttcaagagattgaagtatccaggctgttcttagaacctactcgcaaagacatagcattactaaaattatcctccccggccgtgattacagataaggtgatcccagcctgtctgccttccccaaactacgtggtcgccgaccgaacagaatgtttcatcacaggctggggggagacccaaggcacctttggggccggcctgctgaaggaagctcagctgccagttatagagaacaaagtgtgtaacaggtacgaatttctaaatggcagggtccagtccaccgaactgtgtgccgggcaccttgcaggcggcaccgactcctgccaaggcgacagcggcggcccactggtgtgttttgagaaggacaaatatattttacagggtgtcacttcctggggtctcggttgtgctcggccaaataagcctggagtttacgtacgcgtgtcacgatttgtgacatggatagaaggggttatgaggaataat

SEQ ID NO: 250958 - DNA, 2430 bp, synthetic construct
  misc_feature 1..2430: note = Description of Artificial Sequence: Synthetic coding sequence
  source 1..2430: mol_type = other DNA
atggagcacaaggaggtggttctgcttctattgcttttcttaaagtctggtcagggtgaacctctcgacgattatgtcaacacacagggcgcaagcctttttagcgtgactaagaagcagcttggtgccggttccatcgaggaatgtgccgcaaagtgtgaggaagatgaggagttcacctgcagagctttccagtaccattctaaggaacagcaatgcgtcatcatggctgagaaccgtaagtccagtattataattagaatgagggatgtagtcctgttcgagaaaaaggtctatttgtctgagtgtaagacaggtaacggcaaaaattaccgaggaactatgagcaagacaaaaaacgggatcacttgtcagaagtggtcctccacgagcccccataggccccgtttctcccccgccacacacccgagtgaaggtcttgaggagaattattgccgtaatcctgacaacgatccccagggtccatggtgttataccactgatccagaaaaacggtacgattattgcgatattctcgagtgcgaggaggaatgcatgcattgttccggtgagaactatgacgggaaaatttctaagacaatgtcagggctggaatgccaggcatgggactcacagagtccacatgctcacggctatattccatcgaagttccccaacaagaacctgaagaagaactactgccggaacccagatagggagcttcgtccgtggtgtttcacaactgaccccaataaaagatgggaactctgcgatatacctcgatgcacgaccccccctccatctagcggtccgacataccaatgccttaaaggaacgggtgagaattaccgaggaaatgttgctgtaactgtaagtggtcacacgtgccagcactggtcggcacagactccccatacacacaacagaacccccgagaacttcccgtgcaagaacctcgacgaaaactactgtcgaaaccccgatggaaagagggccccgtggtgtcatacgacgaactctcaagttcgttgggaatactgtaagattccgtcatgcgacagctcgcccgtttccacggaacagttggcccctaccgcaccacccgagcttactccagtggtccaggattgctatcatggcgatggacagtcatacagaggcaccagttccacaactactacgggcaagaagtgccagagctggtcgtctatgaccccccaccgtcaccaaaagacgccggaaaattatcctaatgccggactgacgatgaactactgtagaaacccagatgctgacaaaggcccgtggtgcttcactaccgacccttcggtacgttgggagtattgcaaccttaaaaagtgctccggtacagaagccagtgttgtggcacccccgcccgtcgtactgctcccggatgtcgagactccaagtgaagaagactgcatgtttggtaatgggaaaggatacagaggaaagagagccaccaccgttaccggtaccccctgccaagactgggctgcgcaagagcctcataggcactcaatttttacaccagagaccaatccccgggcaggcctcgagaagaactactgtcggaaccctgacggagacgttggaggaccgtggtgttatacgacgaacccacgaaagctctacgattattgtgatgttcctcaatgcgcggccccatcgtttgactgcggaaagcctcaggtcgagccaaagaagtgccctggtcgagtcgtcggtggatgtgtcgcgcatccacattcttggccctggcaagtgtcgctccgcacacgcttcggtatgcacttttgcgggggaacactcatcagtcctgaatgggtgctaaccgcagcccattgcttggaaaagagtccacgaccttcctcttacaaagtgattcttggtgctcatcaggaagtaaacctggagccacacgtacaggagattgaagtgagtcgtttgtttctcgagcccaccagaaaagacatcgctctcctgaaactctcttctcctgccgttatcaccgacaaggttataccagcgtgtctcccgagcccaaactatgtggtcgcggaccgtacagaatgtttcattaccggatggggagagacccagggcacattcggagctggtctcctcaaagaagcgcagttgcccgtgatcgagaacaaggtttgcaatcgttacgaatttctaaatggtcgagtccaatcaactgagctatgcgctgggcacttggcgggtggtaccgactcttgccagggagactcggggggccctttagtatgtttcgagaaagacaagtacatcttacaaggtgtcacgtcctggggactcgggtgcgcacgcccaaataaaccaggagtgtatgtccgggtgagtcgatttgtgacctggatcgaaggtgtgatgcgtaacaac

SEQ ID NO: 250959 - DNA, 2430 bp, synthetic construct
  misc_feature 1..2430: note = Description of Artificial Sequence: Synthetic coding sequence
  source 1..2430: mol_type = other DNA
atggaacataaggaggttgtgttactacttctccttttcctgaagtcggggcaaggggagcccttagatgattacgttaatacacaaggtgcttctcttttctctgtgactaagaagcaactgggagcaggctcgattgaagaatgcgcagctaaatgtgaagaggatgaagagttcacttgtagagctttccagtaccacagtaaggaacaacaatgcgtaatcatggcagagaaccgtaaaagttcgataattatcagaatgcgagatgttgtactattcgaaaaaaaggtctatttgagtgagtgcaagacaggaaatggcaaaaactatagaggaacgatgtctaaaacaaaaaatggaattacttgccaaaagtggtcttcaacgagtcctcatagacctcgtttttcaccagcaactcacccgagtgaaggtctggaagaaaattactgtcggaatccagataacgatccgcaaggtccatggtgctatacgacagatccagaaaagcgatacgattactgcgacattttggagtgcgaagaagagtgcatgcactgttctggtgagaattacgatggaaagatttcaaaaaccatgtctgggttggagtgccaagcgtgggattctcaatcaccacatgcccatggatatataccatctaaattcccaaataaaaacctcaagaagaattactgccggaatcctgatcgagaactccgcccatggtgctttactactgacccaaacaagcgatgggaactctgtgatattccacgatgtacaactccaccaccttcaagtggaccaacataccagtgtcttaagggaacgggggaaaattatagaggaaatgtcgctgtgacagtcagtggacatacctgtcagcattggtcggcccaaacgccacatacccacaacagaacaccggagaactttccatgcaaaaatctcgatgagaattactgccgtaatcccgatggaaagcgtgcaccatggtgtcataccacaaattcgcaagtgagatgggaatattgtaaaattccgagctgcgactcgagtcctgtttctacagaacagcttgctccgacggccccaccggagctgacccctgtggtacaagactgttaccacggtgacggtcagtcgtatcgtggtacaagttcaaccacgacaactggtaaaaagtgccaatcttggtcatctatgactccacatcggcatcaaaaaacccctgagaattaccccaatgctggattgacaatgaattattgtcgaaatccagatgcagacaaaggaccgtggtgctttaccaccgacccgtctgtacgttgggagtattgcaatctaaagaagtgctcaggaacggaggcatcggttgtggcacccccaccagtcgtcctccttccagacgtagagactccttcggaggaagattgtatgtttggaaacggtaagggatacagaggtaaacgtgctacaacagtcactggaacgccgtgtcaagattgggccgcacaggaaccacatcgtcattctattttcacgccggaaacaaatcctcgggcagggctcgaaaaaaactattgtcgtaatccagatggagacgttggtggcccatggtgttataccactaacccacgtaagctttatgattactgtgatgtgccccaatgcgccgccccatctttcgattgtggaaagcctcaggtcgaaccgaaaaaatgcccaggacgagtggttggaggctgtgtagcacatccacacagttggccatggcaggtttctttacgtacccgttttggtatgcatttctgtggaggaactcttatttctccagaatgggttctgacagcagcacattgccttgaaaaaagcccgcgccctagctcgtataaggtgattctgggagctcaccaggaggtcaatctggagccgcacgttcaagaaatcgaggtatctcgactcttcttggaaccaacccgaaaagacattgccctactaaagctcagttcgccagccgttattacagataaagttattccagcttgtctcccatcgcctaattatgtggttgcggatcgcactgaatgcttcataacaggatggggggaaacacagggtacattcggggcaggattgctgaaagaggcacaattgccagtcatagagaataaggtttgcaatcgttatgagttccttaatggaagagttcagagtacggaactttgcgctggtcatttagccggagggacagattcgtgtcagggagattcagggggtccgttggtctgctttgaaaaggataagtatattctgcagggagtgacgtcatggggactgggatgtgcgcgacccaataagccgggagtgtatgttcgggtgtcaagatttgtaacttggatcgaaggtgtgatgagaaataac

SEQ ID NO: 250960 - DNA, 2430 bp, synthetic construct
  misc_feature 1..2430: note = Description of Artificial Sequence: Synthetic coding sequence
  source 1..2430: mol_type = other DNA
atggagcataaagaagtggtgctgcttcttctcctgtttctgaagtctggacagggagaaccgctggatgattacgtgaacacccaaggggcatcgctcttttcggtgaccaaaaaacaactgggagcaggaagcatcgaagagtgtgcagcgaaatgtgaagaggacgaagaattcacctgtcgcgcattccagtaccacagcaaggaacaacagtgtgtgattatggccgaaaatagaaagtcgagtatcataattcggatgcgggatgttgtgctttttgagaaaaaggtgtacctctccgagtgtaagactggaaacggtaagaattaccggggtactatgtcaaagactaagaacggaataacgtgtcagaaatggtcgtccacttcgccacatagaccaaggttttcacccgcaactcatccttctgagggacttgaggaaaactactgccgtaatcctgacaacgatccgcaaggtccttggtgctacacgactgatcctgaaaaacgatacgattattgtgatatcttggaatgtgaggaagaatgtatgcactgttccggcgaaaactacgatggcaagatttcaaagaccatgtcaggactggagtgtcaggcatgggatagtcaaagcccccatgcccatggatacattcctagcaagttccccaacaagaacctcaagaagaattactgccgcaacccagatcgtgagctcagaccatggtgtttcaccactgaccctaataagaggtgggaactttgcgatatcccaaggtgcactacccctcccccttcgagcggtcctacctaccagtgtctgaagggtaccggcgagaattatcggggtaacgtcgcagttaccgtgtcgggtcatacgtgccagcattggagcgctcagactcctcacactcacaaccgcaccccggaaaactttccgtgcaagaatctggacgagaactactgtagaaaccccgatggcaagagagcgccatggtgtcatactactaactcccaggtccgctgggaatactgtaagattccatcgtgtgattcgtcacccgtgtcgacggagcaacttgctcctaccgcacctcctgagcttacccccgtcgtgcaagattgctaccacggagatggacaatcctacagagggacctccagcaccactaccactggaaagaagtgtcagtcctggtcctccatgaccccacatagacaccaaaagaccccagaaaactacccaaacgcagggcttactatgaactactgtcgcaacccagacgcagataagggaccctggtgttttaccaccgacccgtcagtacggtgggaatattgcaatcttaagaaatgctcgggtactgaagccagcgtggtggctccgccaccagtcgtgctgcttccagacgtcgagactccctcggaagaagattgcatgtttggcaacggcaaagggtaccggggtaaaagggcgaccaccgtaacgggcaccccttgccaagactgggccgcacaagagcctcatcgccattcaatctttacccctgaaaccaatcctcgcgcaggtctggaaaagaattactgtcgaaatcctgacggagatgtcggaggaccttggtgttacaccactaacccacggaagttgtacgattactgtgatgtgccacaatgtgcagcaccgagcttcgactgcgggaagccgcaagtggagcctaagaaatgccctggccgtgttgtcggtgggtgcgtagctcacccccattcatggccatggcaggtgtcacttaggactcgatttgggatgcacttctgtgggggcacgctgatctccccggaatgggtgcttactgcagcccattgtcttgagaaaagcccgaggccatcttcgtacaaagtgattctcggcgcccatcaggaagtgaatctggaacctcacgtgcaagagatcgaagtctccagattgtttctcgaaccaacgcgtaaggacatcgcactgcttaaactgagctcacctgcggtgataactgataaagtgattcctgcctgtctcccatcgcccaattacgtcgtcgcggacagaaccgaatgtttcattaccggttggggagaaacccagggaacttttggcgcgggactgttgaaggaagctcaactccccgtaattgagaacaaggtatgtaaccgctatgaatttctgaacggtcgggtgcaaagcactgagttgtgcgccgggcaccttgcaggaggaaccgactcatgccaaggagactcgggtggtcccctggtgtgtttcgaaaaggacaagtacattctgcagggcgtgacttcttggggcctcggttgcgcaagacctaacaaaccgggagtctacgtccgagtgtccagatttgtgacgtggattgaaggagtgatgcggaataat

SEQ ID NO: 250961 - DNA, 2430 bp, synthetic construct
  misc_feature 1..2430: note = Description of Artificial Sequence: Synthetic coding sequence
  source 1..2430: mol_type = other DNA
atggagcacaaggaagtggtcctgcttctcctcctgtttctgaagtcgggacagggcgaacccctggatgattacgtgaatacccagggcgcctcactgttctcggtgactaaaaagcaactgggagccgggtcaatcgaggaatgcgccgctaagtgtgaggaagatgaggaatttacttgccgagcgttccagtatcactctaaagaacagcagtgcgtgatcatggccgagaaccgcaagtcctcgatcattatccgaatgagagacgtcgtcctgtttgagaagaaggtctatctgtcagaatgcaagactggaaacggcaagaactacaggggtactatgtccaaaaccaaaaacggaatcacttgccagaagtggtcgtcaacttcacctcatagacctcggttctcccccgcaactcatccttcagagggactcgaggagaactactgcaggaatccggacaacgacccacaagggccttggtgttacacgactgatccggaaaagaggtacgactattgcgatatcctggaatgcgaggaggagtgcatgcattgcagcggggaaaactacgacggaaagatctcgaaaaccatgtcgggactggagtgccaagcatgggacagccagtcacctcacgcccacgggtacattccctcaaagtttccgaacaaaaacctcaaaaagaactattgccgcaatccagaccgggaactgaggccctggtgtttcactaccgacccaaataagcggtgggaactctgcgacatcccgcggtgcaccactccgccgccctccagcggaccgacctatcaatgccttaaaggtacgggcgaaaactacagaggtaacgtcgccgtgactgtgtccggccatacttgtcagcattggagcgcacaaactccgcatacgcacaacagaacgccggagaatttcccatgtaaaaacttggacgagaattactgcaggaacccggacggaaaacgggctccctggtgccataccacgaattctcaagtgcggtgggaatactgtaagatcccaagctgtgacagctcacctgtgtcgactgagcaactggcgccaactgccccgccggagctcaccccggtggtgcaggactgctaccacggagatggtcagtcgtacagaggcacctccagcactaccaccaccggtaagaaatgtcagtcatggtcctcaatgaccccacatagacaccagaaaacgccggaaaactaccctaacgcaggcctgaccatgaattactgtcgcaatcctgacgctgacaaaggtccgtggtgctttaccaccgacccttctgtgcgctgggaatactgcaatctcaagaaatgcagcggaactgaagcatcggtggttgcgccgccgcctgttgttttgctccctgatgtggaaaccccttcagaggaagattgcatgttcgggaacggaaaggggtaccgtggaaaacgggcgacgactgtgactgggactccctgccaggactgggccgcccaggagcctcaccgccactccattttcaccccggaaaccaacccacgggcgggactcgagaagaactactgccggaacccagatggcgacgtgggtgggccttggtgctatactaccaatcccagaaagctgtacgattactgcgatgtcccgcagtgcgcggcaccgtcgttcgactgcgggaagcctcaggtggaacctaagaagtgccctggacgggtcgttggaggatgcgtggcgcacccgcactcatggccttggcaggtgtcactgagaacccgtttcggcatgcacttttgtgggggcacccttatcagcccagaatgggtgcttactgcagcccactgcctcgagaagtccccgcggccgagcagctacaaggtgatactgggcgcgcaccaagaagtgaatctcgagccgcacgtgcaagaaattgaagtctcccgcctgttcctggaaccaacccggaaggatatcgcactgctcaagctgtcctcacccgccgtgatcactgacaaggtcatcccagcctgcctcccatccccaaactacgtggtggctgaccggaccgagtgtttcatcacgggttggggtgagacgcagggcactttcggcgctggactgctgaaggaagcgcagttgcctgtcattgagaacaaggtgtgtaaccggtacgagtttctgaatggtcgcgtgcaaagcaccgagctctgtgctggacacctcgctgggggcactgattcctgccaaggagattccggcggaccgcttgtctgtttcgaaaaagataagtatatcctccaaggagtgacttcgtggggactcggttgcgcccgccctaataagccaggagtctacgtgcgcgtgagccgcttcgtcacctggatagaaggcgtgatgagaaataac

SEQ ID NO: 250962 - DNA, 2430 bp, synthetic construct
  misc_feature 1..2430: note = Description of Artificial Sequence: Synthetic coding sequence
  source 1..2430: mol_type = other DNA
atggagcacaaggaagtcgtgcttctcttgctcctgttcctgaaaagcggacaaggggaaccacttgacgactacgtgaatacccagggggcgtcgctcttctcagtaactaagaagcaactcggggccggttctatcgaggaatgcgcagcgaagtgtgaagaagatgaggagttcacctgcagggcgtttcagtaccattccaaagagcaacagtgcgtgatcatggcggagaaccgcaagtcgtcgatcatcatccgaatgcgcgacgtcgtcttgttcgagaagaaggtgtacctgtcagaatgcaaaactggaaatggcaagaattaccggggaactatgagcaaaaccaagaacggaataacctgccaaaagtggtctagtaccagcccccacaggccccgcttctcgcccgccactcacccgtccgagggactggaagaaaactactgccgtaatccagataacgatccgcagggaccatggtgttacaccactgaccctgaaaaaagatatgattactgcgacatcctggaatgcgaggaggaatgcatgcactgttcgggggagaactacgacggcaagatcagtaagactatgagcgggctggaatgccaggcgtgggactcgcaatccccgcacgctcatggatacatcccaagcaagttcccgaacaaaaatctgaagaaaaactactgtcggaacccggaccgggaactccgcccgtggtgcttcactactgaccccaataaacgctgggagctgtgcgatatccctcgttgtactaccccgcctccctcctctggtccaacttaccagtgcctgaaagggaccggcgaaaactatcgcggtaatgtggcagttaccgtgtcgggccacacctgccaacactggtcagctcagaccccacatactcataacaggactccagaaaacttcccgtgcaagaacctcgatgagaactattgccgaaacccggacggtaagcgcgcaccgtggtgtcacaccaccaacagccaagtgaggtgggaatactgcaagatcccatcatgcgattctagcccagtgtccacggaacagctggctccgacggcgccacctgaactcaccccggtcgtgcaagactgctaccatggcgacggtcagtcgtaccggggaacgagcagcaccacgaccaccggcaagaagtgtcagtcgtggtcgtcgatgaccccgcacagacatcagaaaactccggaaaactacccgaacgccggattgaccatgaattactgccggaatcccgacgccgacaaaggaccgtggtgtttcaccaccgatccatcagtgcgatgggagtactgcaatctgaaaaagtgctcgggaaccgaggcctccgtggtcgcgcctccgccggtagtgctcctccctgacgtcgaaaccccttcagaggaggattgtatgtttggaaatggaaagggatatcgcggaaaaagagctacgactgtgacgggaaccccttgccaggactgggccgcccaggaaccgcaccgccattccatcttcactccagagactaacccacgcgccggcctggaaaagaactactgtaggaacccggacggggatgtgggcggaccgtggtgctatactactaatccgcggaagctgtacgactactgcgatgtcccacagtgcgcagccccttcgttcgattgcggcaagccgcaggtggaacccaagaagtgtccgggtcgggtggtcgggggttgtgtggcgcacccacatagttggccgtggcaagtgtccctcagaacccggtttggcatgcacttctgtggcggaactctcataagcccggaatgggtcctgaccgcagctcattgtctggagaagagccctcggccgagctcatacaaagtcattcttggagcacatcaggaggtcaacctcgaaccgcacgtgcaggaaatcgaggtttcccggctgtttcttgaaccaactcgcaaggatattgcacttctcaagctgtccagcccggccgtgatcaccgacaaggtgatcccggcatgcctcccctcccctaactacgtggtcgccgatcgaactgagtgctttatcaccggatggggagagactcaagggaccttcggagccggactcctgaaagaagcccagctgcctgtgatcgaaaacaaggtgtgcaatcggtacgaattcctcaacggaagagtgcagagcaccgagctttgcgcgggtcacctggccggcggcactgactcctgtcaaggggacagcggaggaccgctggtttgcttcgagaaagataagtacattttgcaaggggtgacttcgtggggactgggatgcgctagacccaataagcccggggtttacgtgcgcgtctcacgttttgtaacctggattgaaggcgtgatgcgcaacaat

SEQ ID NO: 250963 - DNA, 2430 bp, synthetic construct
  misc_feature 1..2430: note = Description of Artificial Sequence: Synthetic coding sequence
  source 1..2430: mol_type = other DNA
atggaacataaggaagtcgtcctgcttctcctgctcttcctgaagtccggccaaggcgaacctctggacgattacgtcaacacccaaggtgcctcactcttttcagttactaaaaagcagctcggcgccgggtcgatcgaagaatgcgcagctaagtgtgaggaggatgaggagttcacttgccgggcattccagtaccattccaaagagcagcagtgcgtgattatggcagaaaatcgtaagtcgagcatcatcataaggatgcgggacgtggtgctctttgagaagaaggtctatctctcagagtgcaaaactggaaacgggaaaaactaccggggcacgatgtccaaaactaagaatggaatcacctgccaaaagtggtcgagcacttcccctcataggccacggttcagcccggccacccacccctcggaaggtctggaggaaaattactgcagaaatccggacaacgaccctcaaggaccatggtgttataccacggacccagagaagagatacgattattgtgacatcctggaatgtgaggaagaatgtatgcactgttcgggagagaactacgacggaaagatttccaagactatgtctggcctcgaatgccaagcatgggacagccagagcccgcacgcacatggctacattccgtccaagttccctaacaaaaatctgaagaagaattactgccgcaatcctgatcgagaactccggccttggtgcttcaccactgacccgaacaagcggtgggagctgtgtgatatcccgcgatgcaccactccgcctccttcttcagggccgacttaccaatgtttgaagggtacgggagaaaattacaggggaaacgtggcagtgactgtctcgggacacacctgtcagcactggtcggcccagaccccacacacccataaccgcacccccgaaaatttcccatgtaagaacctggacgagaattattgccggaatcccgatggcaagagagccccgtggtgccacaccactaactcacaggtgcgctgggaatattgcaaaatcccatcatgcgattcgtcgcctgtgtccaccgaacagctggcaccgaccgccccgcccgaattgacgccggtggtgcaagactgctaccatggagacggtcagtcgtatagaggcacctcgagcactaccaccacgggaaagaaatgccagagctggtcgtcgatgactccgcaccgccaccagaaaaccccagaaaactacccgaatgccggactgaccatgaactactgcagaaaccctgatgccgataagggtccgtggtgcttcactacggacccctccgtgaggtgggagtactgcaatttgaagaagtgcagcgggacggaagctagcgtggtggcaccgcccccggtggtgctgctgccggacgtggagactccttcggaagaggactgcatgttcgggaacggaaagggataccgtggaaagagagctactaccgtgaccggtaccccttgccaagattgggcggctcaggagccacaccggcattcaatcttcaccccggaaaccaaccctagagcgggactggaaaagaactactgtcgcaaccctgatggagacgtcgggggcccatggtgctacactactaacccgcggaaactctacgattactgcgacgtgcctcagtgcgccgcgccatcctttgactgtggaaagccccaggtggaaccaaaaaagtgccctgggcgcgtcgtcggcggttgcgtggcccatccacattcatggccgtggcaggtgagcctgcggacccgcttcggcatgcatttctgcggaggaacccttatctctccggaatgggtgctgactgccgcgcactgcctcgagaagtcccctaggccgagctcttacaaggtgatcctcggtgcgcatcaagaggtgaacctggagccacatgtgcaagaaatcgaggtgagccgcctttttctcgagccgactagaaaagacattgcccttctgaagctgtcatcgccagctgtcatcactgacaaagtcatcccagcatgcctcccaagcccaaactatgtcgtcgcggaccggaccgagtgctttatcactggatggggtgaaactcagggtacctttggagcgggtctgctcaaggaggctcagctgcctgtcatagaaaacaaggtgtgcaaccgctatgagttcctgaacggaagggtccagtcaactgaactctgcgcgggacacctggcgggcggaaccgactcgtgccagggagattcgggcggaccgctcgtgtgctttgaaaaggacaagtatatcctgcaaggtgtgacttcgtggggccttggatgtgcacgcccaaacaagccaggagtgtacgtgcgcgtctcgcggttcgtgacctggatcgagggagtgatgaggaataat

SEQ ID NO: 250964 - DNA, 2430 bp, synthetic construct
  misc_feature 1..2430: note = Description of Artificial Sequence: Synthetic coding sequence
  source 1..2430: mol_type = other DNA
atggagcacaaggaagtggtgcttctgcttctgctcttcttgaagtccggacagggagaacccctcgatgactacgtgaacactcaaggcgcatcactcttctccgtgaccaagaagcaacttggagcgggaagcatcgaggaatgcgcagctaaatgtgaagaagatgaagagttcacttgccgggccttccagtaccattctaaggagcagcagtgcgtgatcatggcggagaatcgaaagtcgtcgatcattatccggatgcgggacgtggtgctgttcgagaagaaagtgtacctgtcggaatgtaagaccggaaatggaaagaattaccggggaaccatgtcgaaaaccaagaacggcattacttgtcaaaagtggtcgtcaacttccccgcaccggcctagattctccccagcaacccatccctccgaaggattggaggagaattactgtcgtaatccagacaacgacccgcagggtccctggtgttacactaccgacccggagaagagatacgattactgcgacatcctggaatgcgaggaagaatgcatgcactgcagcggagagaattacgatggaaagatctccaagaccatgtcgggtctggagtgtcaggcatgggactcacaatctccacatgcgcacggctacatcccgtcaaagtttccgaacaagaatctgaagaaaaactactgcaggaaccctgatcgcgaacttagaccttggtgtttcactacggaccctaataagcggtgggaactgtgcgacatcccgcggtgtactaccccgccgccgtcatccggtccgacctaccagtgcctcaagggaaccggagagaactaccggggaaatgtggctgtgaccgtgtccgggcacacttgccagcactggtcagcgcaaaccccccacacccataatagaacccctgaaaacttcccttgcaagaacttggacgaaaactactgccggaacccagatggaaaacgcgccccttggtgccacaccaccaactcccaggtgcgctgggagtattgtaaaatcccatcatgcgattcatcgccggtgtcaaccgaacaactggcgccgactgcccctccggaactcactccggtggtgcaggattgctatcatggagatggccaatcctaccgtggcacgagctcaactactactaccggcaaaaagtgtcagtcatggtcctctatgacgcctcacagacaccaaaagactccggagaattaccctaatgctggcctcactatgaattactgccgcaacccagacgcagataagggtccgtggtgttttactacggatccatccgttaggtgggagtattgcaatctgaagaagtgctccggtactgaagcgtcggtggtggctccacccccagtcgtgctgctcccggatgttgaaaccccctcagaggaggattgcatgtttggaaacggtaagggataccgcggcaaaagggcgaccaccgtcaccggcacgccatgccaggattgggccgcccaagagccacatcggcatagcatctttactccggaaaccaaccctcgcgctggtctggaaaagaactactgtaggaacccagacggggacgtcggtgggccgtggtgctatactacgaacccgcgcaagctctacgactattgcgatgtgcctcagtgcgcagctccttcgttcgactgcggcaagccgcaggtggagccaaagaagtgcccgggaagagtcgtcggggggtgtgtggcacatccccactcatggccgtggcaagtgagcctgcgcaccaggttcggtatgcacttttgcggaggaaccttgatctcgccggaatgggttctcaccgcggcacactgtttggagaaatcacctcggccgtcgtcgtacaaagtgatcctgggggcgcaccaagaagtcaacctggaaccccatgtgcaggaaatcgaggtgagcaggctgtttctggaaccaaccagaaaggacatcgccctgctcaagctgagctcgccagcagtgatcaccgacaaagtcatcccggcctgcctgcctagcccgaactacgtggtggcggaccgcaccgaatgctttatcaccggatggggcgaaactcagggaacctttggagcaggtctgttgaaggaagcccaactcccggtgatcgagaataaggtttgcaacagatacgagtttctcaacggaagagtgcagtcgaccgagttgtgcgcaggacacctggcaggaggcactgattcgtgccaaggcgactctggaggaccactggtctgctttgaaaaggataagtacatcctccaaggagttacctcgtggggacttggctgcgctcggccaaacaagccaggggtgtacgttcgggtgtcgcggttcgtcacttggatcgaaggcgtgatgagaaacaat

SEQ ID NO: 250965 - DNA, 2430 bp, synthetic construct
  misc_feature 1..2430: note = Description of Artificial Sequence: Synthetic coding sequence
  source 1..2430: mol_type = other DNA
atggaacataaggaggtggtgctgctgctcctcctcttcctgaagtcgggacaaggggagccactggacgactacgtgaatacccaaggggcctcgcttttttctgtgacgaaaaagcagctgggagctgggtctatcgaagagtgtgccgccaagtgtgaggaagatgaagaattcacgtgcagagcgttccagtaccacagcaaggagcagcaatgtgtcatcatggccgaaaaccgaaaatcatcaatcataatccggatgcgggacgtggtgctgttcgagaagaaggtctatctgagcgaatgcaagaccgggaatgggaagaactaccgcggaacgatgagcaagactaaaaacggaatcacttgtcaaaagtggtcctcaacctccccgcaccgcccgcggtttagccctgcgacccacccctcggaaggactcgaagaaaactattgtcggaacccggataacgatcctcagggtccttggtgctacaccaccgatccagaaaaacgctacgattactgtgacatcttggagtgcgaagaagagtgcatgcattgttccggggagaattacgacggcaagatatccaaaaccatgtcaggacttgagtgtcaggcatgggactcgcagtcccctcatgcccacgggtacattccctcgaagttccccaacaagaatctcaagaaaaactactgcagaaatcccgatcgcgagctgcgcccgtggtgctttaccacggatccaaacaagcgctgggaactgtgtgacatccccaggtgcaccaccccgccgccgtcctctggtccaacctaccagtgccttaaagggactggtgagaattaccgcggaaatgtggcggtgaccgtctctggacatacctgtcaacattggtcagcacagacccctcacactcataaccgcactcccgaaaacttcccatgcaagaacttggatgaaaactactgtcgcaacccggacggaaagagggctccatggtgccacaccaccaacagccaagtgaggtgggagtactgcaagatcccctcgtgtgattcgagcccggtgagcactgagcagctggcaccaaccgcgccccctgagctcactccggtggtgcaggattgctaccacggagacggccagtcgtatcgcggaacttccagcactaccaccaccggaaagaaatgccagtcatggtcgagcatgactccacatcggcaccagaaaactccggagaattacccgaacgcaggactgaccatgaactactgccggaaccctgacgccgataagggaccctggtgtttcactactgacccctcggtccggtgggaatactgtaacctgaaaaagtgcagcggaactgaggcctccgtcgtcgccccgcccccagtggtcctgctgccggacgtcgaaaccccatcagaagaggactgtatgttcggaaacggcaagggataccgcggaaaacgcgccacgaccgtgactggaactccttgccaagattgggcagcacaggaaccccacaggcattcgatcttcaccccagagactaacccgagagccggactcgaaaagaactactgtcggaacccagatggggacgtcggaggaccatggtgctatacgactaatcctagaaaactgtacgactactgcgacgtgcctcagtgcgcagcgccgtccttcgattgcggtaagccccaggtggaacctaagaaatgcccgggacgggtggtagggggttgcgtcgcgcatccgcattcctggccgtggcaggtgtcacttcggactcgattcggtatgcacttctgcgggggaaccctcatctcgccggagtgggtcctcactgcagcgcactgcctcgaaaagagccctcgcccatcaagctataaggtgattctgggagctcaccaggaagtcaacctggagccgcacgtgcaagaaatagaagtctcccgtctctttttggaaccaactaggaaggacatcgctttgcttaagctgagcagtccggctgttatcaccgacaaagtgatccccgcctgcctcccctcaccgaactacgttgtggctgacagaactgaatgcttcatcaccggatggggagaaacccagggcacgtttggagccgggctcctgaaagaggctcaactgccggttatcgagaataaagtgtgcaatcggtacgagtttctgaatggtcgcgtgcagagcactgagctttgcgccgggcacttggcaggtggcaccgactcctgccaaggtgactctggaggacctctcgtttgcttcgagaaagacaagtacattctgcaaggggtcacctcatggggcctcggctgcgcccggccgaataagccaggggtgtacgtgcgggtgtcccggttcgtgacctggatcgaaggagtcatgagaaataac

SEQ ID NO: 250966 - DNA, 2430 bp, synthetic construct
  misc_feature 1..2430: note = Description of Artificial Sequence: Synthetic coding sequence
  source 1..2430: mol_type = other DNA
atggagcataaggaggtcgtgctgttacttctcttgttcctgaagtccggccagggtgagccactggacgactacgtgaacacacagggcgcctcccttttttcagtcacgaagaaacaacttggcgccggaagtattgaggagtgcgcagccaaatgcgaggaggacgaagagttcacgtgccgtgcattccagtaccattcgaaggaacagcagtgcgtgattatggcagagaatcgcaagagctcaataataattcggatgcgcgatgtagtgctgtttgaaaagaaagtttatctcagcgagtgtaaaaccggcaatggcaagaactaccgtggtacgatgtcgaagaccaagaacggcattacttgccaaaaatggagcagcacatccccccatagaccacgcttcagtcctgcgacccacccaagcgagggcctcgaggagaattattgccggaatccggataatgatccacaaggcccgtggtgctatacaacggaccccgagaagcgttacgactactgtgatatactggagtgcgaagaggaatgcatgcattgtagcggagaaaactacgacggtaaaattagcaagacgatgagcggtttggagtgccaagcttgggacagccaatcgccgcacgcccacggctacatccctagtaagtttccaaacaagaatttgaagaagaactactgtcgtaatcccgatagagagctccggccctggtgttttactacggatccaaataagcgatgggagttgtgcgatatccctcgatgcactacacccccaccctcaagtggtccgacctatcagtgcctaaagggaacgggagagaattaccggggcaacgtggcggtgaccgtgagcggacacacctgtcagcactggagcgcgcagactccacatacccataacaggactccggaaaatttcccgtgcaagaatctggacgaaaattattgccgaaacccagacggcaagcgagcaccgtggtgccacaccacgaatagccaggtgaggtgggagtattgtaagataccatcctgcgactcatccccagtctctaccgagcagctagcgccgaccgctccgcccgagctgaccccggtggtccaggattgctaccatggcgacggtcaaagctatagaggcacgagcagcaccaccacgactggcaagaaatgccaatcctggagcagtatgacaccacatcgtcatcaaaagacaccagaaaattatcccaacgcgggcctgacaatgaattactgcaggaaccccgacgccgacaagggcccgtggtgcttcaccaccgatccctccgtgcgatgggagtattgcaatctcaagaaatgttcgggcaccgaggcctctgtcgtcgcgcccccaccggttgtgctgctgcccgatgtcgaaacaccctccgaggaggactgtatgtttggcaacggtaagggataccgtggaaagcgcgccacgaccgtcaccggcacgccatgtcaggattgggccgcgcaggagccccaccgccactctatcttcacgccggagacgaacccccgcgcgggattggaaaagaactactgccgtaatcccgacggcgacgtcggcggtccgtggtgctatacaacgaatcccaggaaactgtacgactattgcgatgtcccccaatgtgcggcgccatcgtttgactgcgggaagccacaagtcgagccgaaaaagtgtccaggccgcgtggtggggggatgcgtcgcacatcctcattcatggccatggcaggtgagcttacgcacgaggtttggcatgcatttttgtggcggcacgctcatttccccagagtgggtgttgaccgcggcccattgtctggaaaagtcgccccgcccgtcttcctacaaggttatcttgggagcacaccaggaagttaacttggagccacatgttcaggagatcgaagtgagccgcctcttcctggagccgactcgcaaagacatagcgctattgaagttgtccagcccggcggtgattactgataaggtcattcctgcatgcttgccctcgcccaattacgtggtggcggatcggactgagtgtttcataaccggctggggagaaactcagggtacgttcggcgcgggactgctgaaggaagcgcaactgcccgtgattgagaacaaggtgtgtaatcgctatgagttcctaaatggccgtgtgcagagcacggaattgtgcgcgggccacttggcaggcggtaccgatagctgtcagggcgattcggggggtcccctcgtatgctttgaaaaggataagtatatcctgcaaggagttacatcgtggggcctgggctgcgcacgcccaaacaagcccggtgtgtacgtgcgggtctcgcgcttcgtgacatggatagaaggtgtcatgaggaacaac

SEQ ID NO: 250967 - DNA, 2430 bp, synthetic construct
  misc_feature 1..2430: note = Description of Artificial Sequence: Synthetic coding sequence
  source 1..2430: mol_type = other DNA
atggaacacaaagaggtcgtgctgctgctgctcctgtttctcaaaagcggacaaggagaaccactcgacgattacgtgaatactcagggtgcaagcctcttctcggttaccaagaaacagttgggagctggcagcatcgaagaatgtgcggccaaatgcgaggaggacgaggagttcacttgccgcgcattccagtaccactccaaggaacagcaatgcgtcattatggcagaaaacaggaaatcgtctatcatcattagaatgcgggacgtggttctcttcgaaaagaaggtctacttgtcggagtgcaagaccggaaatggcaagaactacagaggcaccatgtcgaaaactaagaacggcattacctgccagaaatggtcgagcacgtcccctcataggccgcggttctcaccggctactcacccgtcggagggactcgaagagaattactgtcggaaccccgataatgacccacagggaccgtggtgctacactactgacccggaaaaacgctacgattactgcgatatcctcgagtgcgaagaggaatgtatgcactgtagcggagagaattacgatggtaagatctcgaaaactatgtcgggtctggaatgtcaagcctgggactcgcagtcgccccacgcccacggatacatcccttcgaagttccctaacaagaatctcaaaaagaactactgccggaacccggaccgggaacttcgcccgtggtgtttcactaccgacccgaacaagcgctgggaactgtgcgacatcccccggtgtaccacgcctccaccatccagcgggccaacctaccagtgtctgaaaggaactggagagaactaccggggaaatgtcgcagtcactgtgagcggacatacgtgccagcattggtcagctcagaccccgcatacccacaaccggactcccgaaaacttcccgtgcaaaaacttggacgaaaactattgccggaatccggatggcaagcgggccccttggtgtcacactaccaatagccaggtgcggtgggagtattgtaaaatcccgagctgtgattcatcaccggtgtcaaccgaacaactcgcccccactgcaccccccgagctgaccccggtcgtgcaagactgctaccatggggacggtcagtcctaccggggaacctcgtcaaccaccactaccgggaagaagtgtcagtcatggtcgtcaatgacccctcatcggcaccagaaaacgccggagaactatccgaacgctgggctgactatgaattactgcagaaatccggacgccgacaagggtccatggtgttttaccaccgacccctccgtgcggtgggaatattgcaaccttaagaagtgttcgggtactgaagcctccgtcgtggccccgccgccggtggtgctgcttccagatgtggaaaccccctccgaagaggactgcatgtttgggaacggaaaggggtacaggggtaagcgggcgaccactgtcaccgggactccctgccaagattgggccgcgcaagaaccccatcggcattcaattttcactccggaaactaacccccgggccggactggagaaaaactattgtcggaatcctgatggagatgtgggaggaccgtggtgttataccaccaatccgaggaagctctacgattattgcgacgttccacagtgcgcggccccttcgtttgactgcggaaagcctcaagtagaacccaagaagtgcccaggacgcgtggtgggagggtgcgtcgcgcatccccacagctggccatggcaggtgtccctgagaactaggtttgggatgcatttctgcggaggaactttgatcagtccagagtgggtgctgaccgccgcccactgtctggaaaagtcccctcggccatcaagctacaaggtgatcttgggggcgcaccaagaagtgaatctggagcctcacgtgcaggagatcgaggtgtcgcggctcttcctggaaccaacccgcaaggatattgccctgttgaagctctcgtccccggccgtgatcaccgacaaggtgatcccggcctgcctgccatctccgaattacgtggtcgccgatcggactgagtgcttcatcactggatggggagagacgcaaggtactttcggtgcgggcctgctgaaggaggcacagctgccagtgattgagaataaggtgtgtaaccgctacgaattccttaacggaagggtacaatctaccgaattgtgtgctggtcacctcgcaggaggcaccgatagctgccagggagattcgggaggaccgctggtgtgctttgagaaggacaagtacatcctgcagggagtgacgtcctgggggctcggatgcgctagaccaaacaaacctggcgtgtacgtgcgcgtctcgcgattcgtgacgtggatcgaaggcgtcatgcgcaacaac

SEQ ID NO: 250968 - DNA, 2430 bp, synthetic construct
  misc_feature 1..2430: note = Description of Artificial Sequence: Synthetic coding sequence
  source 1..2430: mol_type = other DNA
atggaacacaaggaagtggtgctgctcctgctcctcttcctgaagtcagggcagggggagcctctggacgattacgtcaatacccaaggtgcctcgctcttcagcgtgactaagaagcagctgggagcaggatccatcgaggagtgcgccgcgaaatgcgaagaggatgaagaattcacgtgccgagcgttccaataccactccaaggaacaacaatgcgtgattatggccgagaatcggaagtcgtcgatcataattcggatgcgcgacgtggtgctgtttgagaagaaggtgtatctctcggagtgcaaaaccggaaacggaaagaattaccgcgggaccatgagcaaaaccaagaatggtatcacttgccaaaaatggagcagtacttccccgcatcgcccaaggttctcgccggcaacgcatccgagcgagggacttgaagagaattactgtagaaacccagataacgatccccagggaccctggtgctacactaccgaccctgaaaagagatacgactactgcgatattcttgaatgcgaagaagaatgcatgcactgtagcggcgagaactacgacggtaagatttccaagactatgagcggtctggaatgtcaggcatgggactcgcagtccccgcacgcgcacggatacatcccttcaaagttccctaacaagaatctgaaaaagaactattgccggaatccggatcgggaactgcgtccatggtgttttactaccgaccccaacaaaagatgggagctctgcgacattcccaggtgcactactcctccaccaagctccggccctacctatcaatgcttgaagggcacgggtgagaactatagaggaaacgtggctgtgacggtgtcggggcatacctgccaacactggtcagcacagactccgcatactcacaaccggactccagagaacttcccttgtaaaaaccttgacgagaactactgtcgcaatccggatggaaagagagctccctggtgtcataccaccaactcacaggtccgctgggagtactgtaagatcccgagctgtgactcgtcacccgtgtccacggaacagctggctccaaccgctccgccagaactgactccggtagtccaggattgctaccatggtgatggacagtcctaccgggggacctcgtccaccaccactaccgggaagaagtgccaatcatggtcgtccatgaccccgcatagacaccaaaagaccccggaaaactacccgaacgcgggactcaccatgaactattgtcgaaacccagatgccgataagggcccttggtgcttcacgactgatccatcggtgcggtgggaatattgcaacctgaaaaagtgttctgggactgaagcgtccgtggtggccccgccaccggttgtcctgctgcctgacgtcgagactccgtcagaggaggactgcatgttcggaaatggaaaaggatacagagggaagcgggccactacggtgactggaactccgtgccaagactgggcagcccaagaaccacatcgacactctatcttcaccccggagactaacccgcgcgctggactcgagaaaaactactgccgaaatccggacggagacgtcggaggcccgtggtgctacaccaccaaccctcgcaagctctatgactactgtgacgtgcctcagtgcgcggcaccgagtttcgattgcggaaagccgcaagtcgagccaaagaagtgcccaggcagggtggttgggggctgcgtggcccaccctcattcgtggccatggcaggtgtcgcttagaacccgctttggaatgcacttttgcggcggtaccttgatctcgcccgagtgggtgttgaccgccgcacattgcctcgaaaagtccccaaggccatcgtcctacaaagtgatcctgggcgcccaccaagaagtgaacctggaaccgcatgttcaggagatcgaagtgagccggctctttctggagcctactcggaaagacatcgcactcctgaagttgagctctcccgctgtgatcacggataaggtgatcccggcctgtctgccgagcccaaactacgtggtcgccgaccggactgagtgttttatcaccggatggggagaaacccaagggactttcggagcgggcttgctcaaagaagcccagctgcccgtcattgagaataaagtgtgcaaccgctacgaattcctgaacggaagggtccagtccacggaactgtgcgcaggccatctggccggagggactgactcatgccaaggggactcaggcggcccgctggtctgcttcgaaaaggacaagtacattttgcagggagtcacgtcctggggactgggatgcgcacggccgaataagccgggagtctatgtaagggtatcgagattcgtgacctggatcgaaggagtgatgcggaacaat

SEQ ID NO: 250969 - DNA, 2430 bp, synthetic construct
  misc_feature 1..2430: note = Description of Artificial Sequence: Synthetic coding sequence
  source 1..2430: mol_type = other DNA
atggaacataaagaagttgttctactacttttacttttccttaaatcaggacaaggagaacctttagatgattatgttaatacacaaggagctagtcttttttctgttacaaaaaaacaacttggtgcaggaagtattgaagaatgtgcagctaaatgtgaagaagatgaagaattcacatgtagagctttccaatatcattcaaaggaacaacaatgtgttattatggcagaaaatcgaaagtcatcaataattattagaatgagagatgtagttttatttgaaaaaaaggtttacttatcagaatgtaaaactggtaatggaaaaaattatagagggacaatgtcaaaaactaaaaatggaattacatgtcaaaaatggtcttcaacatcaccacatagaccaagattttcaccagcaactcatccatcagaaggtcttgaagaaaactattgtcgtaacccagacaatgatccacaaggaccttggtgttatactacagatccagaaaaaagatatgattattgtgatattttagaatgtgaagaagaatgtatgcactgttcaggagagaactatgacggaaaaatttctaaaactatgagtggattagaatgtcaagcatgggattcacaatcacctcatgctcatggatacattccaagtaaatttcctaataagaatttaaaaaaaaattattgtagaaatccagatagggaacttagaccatggtgttttactacagatccaaataaaagatgggaattatgtgatattccaagatgtactacacctcctccatcatctgggccaacttatcaatgtttaaaaggaacaggggagaattaccgaggaaatgtagcagttactgtttcaggacatacatgtcaacattggtcagctcaaacaccacatactcataatcgaactccagaaaattttccatgtaagaatttagatgaaaattattgtcgtaacccagatggaaaaagagctccatggtgtcatacgacaaacagtcaagttagatgggaatattgtaaaattccaagttgtgatagttcaccagtatcaaccgaacaattagctccaacagcaccaccagaattaacaccagtagtacaagattgttatcacggtgacggtcaatcttatcgaggaacatctagtactacaacaactggaaaaaaatgtcaatcttggtcatctatgacacctcatcgtcatcaaaaaactccagaaaattatccaaatgctggattgacaatgaattattgtagaaatccagatgcagataaaggaccatggtgttttacaacagatccatcagttcgttgggaatactgtaatttaaaaaaatgttcaggaactgaagcatctgttgttgcaccacctccagttgttttattaccagacgttgaaacaccaagtgaagaagattgtatgtttggaaatggaaaaggatatagaggaaagagagctactacagttactggtactccatgtcaagattgggctgcacaagaaccacatagacactcaatatttactccagaaactaatccaagagctggacttgaaaaaaattattgtagaaatccagacggagatgtaggtggtccatggtgttatacaacaaatccaagaaaattatacgattattgtgatgttccacaatgtgcagctccatcatttgactgtggtaaaccacaagttgaacctaaaaaatgtccagggagagttgtaggaggatgtgttgctcatccacattcatggccatggcaagttagtctcagaactagattcggaatgcatttctgtggagggacattaataagtccagaatgggttcttactgctgcacattgtttagaaaagagtccaagaccttcttcttataaagtaatattaggtgcacatcaagaagttaatttagaaccacacgttcaagaaatagaggtatctagattatttttagaaccaaccagaaaagatattgctcttttaaaactaagtagtccagcagttattactgataaagtaattccagcttgcttaccatccccaaattatgtagtagcagatagaacagaatgtttcattactggatggggagaaactcaaggaacatttggagcaggattacttaaggaggcacaacttcctgttattgaaaataaggtttgtaatagatatgaattcttaaatggacgtgttcaatcaacagagctttgtgcaggtcatttagcaggaggaacagattcatgtcaaggagatagtggtggaccacttgtatgttttgaaaaagataaatatattttacaaggagtaacatcctggggactaggttgtgcaagaccaaacaaacctggagtatatgtaagagttagtagatttgtcacttggatagaaggagttatgagaaataat

SEQ ID NO: 250970 - DNA, 2430 bp, synthetic construct
  misc_feature 1..2430: note = Description of Artificial Sequence: Synthetic coding sequence
  source 1..2430: mol_type = other DNA
atggagcacaaggaagtcgtcctgctgctcctgttatttctaaaaagcggccagggcgaacccctggacgactacgtcaacacccagggagcatctctattttcagtcacgaagaagcagttgggcgctggcagcatcgaggaatgcgctgccaaatgcgaggaagacgaggagttcacctgtcgagctttccaataccactccaaagaacagcagtgcgtgatcatggcagagaatagaaagtcctccataattatccgaatgagagatgttgttctgttcgagaaaaaagtctacctgtctgaatgcaagacgggaaacggaaagaactatagaggtacgatgtccaagactaagaatggcataacttgccagaaatggtcctctacctccccccatagaccccggttctcccctgccacccacccatccgaggggttagaggagaactactgtaggaaccccgacaacgaccctcagggaccatggtgctacaccacggatccagagaaacgatacgactactgtgacattctggaatgtgaagaagagtgcatgcattgcagcggagagaactacgacggcaaaattagcaaaaccatgagtgggctggaatgtcaggcttgggatagccagagcccccatgctcacggctacataccaagtaagtttcccaacaaaaatctcaaaaagaactactgcagaaatcccgacagagagctacgaccttggtgcttcacaactgatcctaacaaacgctgggaactttgcgatatacctcggtgtaccacaccacctccttccagcggccccacgtatcagtgccttaaaggcacaggagagaactaccgggggaacgttgccgtcactgtgtcaggtcatacctgtcagcactggagcgcgcaaactccacatacacacaaccgcacaccagaaaactttccttgcaagaatctggatgaaaattattgtcggaaccccgatggcaagcgcgctccttggtgtcacactaccaacagccaggtcagatgggagtactgtaaaattccgagctgcgatagcagccctgtttctactgagcagttggcccccactgcccccccagagcttactcccgttgtccaggactgctatcacggcgatggccaatcctaccgaggaaccagctcgactacaactaccggtaaaaagtgtcagagctggagttctatgacaccccaccgtcatcagaaaacccctgaaaactatcccaacgcaggattgaccatgaactactgtcgtaacccagacgcggacaaaggtccttggtgctttacaaccgacccctccgtccgttgggagtactgcaaccttaagaagtgttccggtactgaggcatcagttgtcgccccacctcccgtggttctgctcccagatgtcgaaacaccaagtgaggaagattgcatgtttggaaacggcaagggatacagggggaagcgagccacaaccgtgactggcacaccttgccaagactgggcagcacaggagcctcacaggcacagtatctttacacctgagacaaatccccgagcaggtctagagaaaaattattgcagaaatccggatggcgacgtgggaggaccttggtgttacaccacgaatccccggaagctgtatgattattgcgatgtgccacagtgtgccgccccttcttttgactgtgggaagccgcaggtagagcccaaaaagtgtcctggcagggttgtcgggggttgcgtggcacaccctcacagttggccatggcaagtgtcccttcgcacgcgctttggaatgcacttttgtggcggtacgctgatctcgcccgagtgggttctgaccgcggcccactgtttggagaagtcacctaggccatcatcgtacaaggttatccttggggcgcaccaggaagttaatcttgagccccacgtgcaggagattgaggtaagtagactctttcttgagcccacacggaaggacattgcgcttttgaagctgagctcacccgccgttatcacagataaagtgatcccggcctgtctaccgtctccaaactatgttgtggccgatagaacggaatgcttcatcacaggatggggggagacccagggaacgtttggcgctgggctgctgaaagaagcccaacttcccgtcatcgagaacaaagtctgtaaccgctacgagtttctcaacggacgcgtgcagagcacagagctgtgcgctgggcatcttgccggaggcacagattcttgtcaaggcgattcaggaggtccgcttgtctgcttcgagaaggataaatacattttacagggcgtaacctcatggggtcttgggtgtgcaaggccaaacaaaccaggagtttatgtaagggtgagcaggtttgtgacatggatcgaaggggtgatgcgcaacaac

SEQ ID NO: 250971 - DNA, 2430 bp, synthetic construct
  misc_feature 1..2430: note = Description of Artificial Sequence: Synthetic coding sequence
  source 1..2430: mol_type = other DNA
atggaacacaaagaagtagtcctcctgcttctgctgttcttgaaatctggacagggcgaacccctggacgactacgttaatacccagggcgcatctttgttctccgtgactaaaaagcaactgggcgctggctctatcgaagagtgcgctgccaagtgtgaggaagatgaggagttcacatgtagagcttttcagtatcattctaaagagcagcagtgcgtgattatggccgaaaatagaaagagctctatcatcatccgtatgcgcgacgtggtgttgttcgagaagaaagtgtatctcagcgaatgcaaaacaggcaatggtaagaattacaggggcacaatgtctaagacaaagaatggtataacatgccagaaatggtcctccacttcacctcatcgccctcgcttctcacctgcaacacatccaagcgagggcctggaggagaactactgcagaaatcctgacaatgaccctcagggaccctggtgttacaccactgacccagaaaaacgctacgactactgtgatattttggaatgcgaggaggaatgcatgcactgctctggtgagaattatgacggaaaaatcagtaagacaatgagcggactcgaatgtcaagcttgggactctcaaagccctcatgcacacggctacatccccagtaagttccccaacaagaatctgaagaagaactactgcaggaatcccgacagagaattgaggccctggtgtttcactacagaccctaataaacgttgggaactctgtgatatcccccgttgtactacacctccacctagttctggccccacataccaatgcctcaagggcacaggtgaaaactatcgcggaaacgtcgccgtgaccgtgtccggccacacatgccagcactggtccgctcagacccctcatacccataaccgcacccctgagaacttcccttgtaaaaacctggatgaaaactattgcagaaaccccgacggcaagagggccccatggtgccatactacaaactcccaagtccgttgggagtattgtaagatcccctcatgcgatagctctcctgtgagtactgaacagctcgcacctaccgctccacccgagctgacacccgttgtgcaggattgctaccatggagacggtcagtcttaccgtggcacctctagtactacaacaaccggtaagaaatgtcaatcctggtcatccatgactccccatcgtcaccagaagactcccgagaactatccaaacgctggtttgaccatgaactattgtcgcaaccccgacgctgataagggaccttggtgtttcacaacagatcccagcgtacgttgggagtactgcaatttgaagaagtgctcaggtacagaggctagtgtcgtcgctcctccacctgtcgtccttttgcccgacgtggagacccccagtgaagaggattgtatgtttggaaacggcaagggttataggggtaagagggccacaacagtgacaggcaccccctgccaagactgggcagcacaggagccccacaggcattcaatcttcactccagagaccaacccacgtgctggtcttgaaaagaattactgtaggaacccagatggcgacgtgggtggcccatggtgctacacaactaatcccaggaaattgtacgactactgcgacgtgcctcagtgcgctgcaccttccttcgactgcggaaagcctcaggttgagcctaagaagtgccccggaagggtggtcggtggttgcgtcgcccatccacactcatggccttggcaagtttccctgaggacacgttttggcatgcacttctgcggcggcacactgatttcccccgagtgggtcctgaccgccgcccactgcctggagaaaagccctcgccccagttcctataaggtaattctgggtgcccaccaggaagtgaatctcgagccacacgtacaagagatagaggtttctcgtttgttcctggagccaactcgcaaggatatcgctctgctgaagcttagcagtcccgccgtgatcaccgacaaagttatcccagcctgtttgccctccccaaattatgttgtagcagataggacagaatgttttatcaccggctggggagagacacaaggaacattcggtgccggacttttgaaggaggctcaactgcctgtgatcgaaaataaggtgtgtaaccgttacgagttcctgaatggacgcgtgcagtcaacagaactttgcgctggacacctggccggcggtaccgattcatgccagggcgactcaggtggtccccttgtttgcttcgagaaagacaaatacatcttgcaaggtgtcacctcctggggactgggatgcgccagacccaacaagcccggcgtttatgtacgcgttagcaggtttgtaacttggatcgagggagtcatgcgtaataac

SEQ ID NO: 250972 - DNA, 2430 bp, synthetic construct
  misc_feature 1..2430: note = Description of Artificial Sequence: Synthetic coding sequence
  source 1..2430: mol_type = other DNA
atggagcataaggaggtcgtgctcctccttctgctttttctaaagagcggccagggcgaacccctggatgattatgttaatacgcagggagctagtcttttcagcgtgaccaagaagcaattgggcgctgggtccatcgaagagtgtgcagctaaatgtgaagaagacgaagaatttacatgtagggccttccagtatcactccaaggagcaacagtgtgtgatcatggccgaaaatcgcaagtcctcaattattatccggatgcgtgatgttgttttatttgagaagaaagtgtacttgagtgaatgtaagaccggcaacgggaagaactacaggggtactatgtcaaaaacgaagaacggcatcacgtgtcagaaatggtcctccaccagcccacatcgaccaagattctctcctgcgactcatccgtccgagggactggaggaaaattactgtcgcaaccccgacaatgacccacaaggaccatggtgttatacaaccgatccagagaaacgttacgattactgtgatattctggagtgcgaagaagaatgcatgcattgttcaggggaaaactacgacggaaaaatttctaagacaatgtcgggtttagagtgtcaagcctgggatagccagtctccacacgcccatgggtatatcccctccaaatttcccaacaagaacctgaaaaagaattactgtcgcaatcctgaccgggagctccggccatggtgcttcacgacagaccccaataagcgctgggaactttgcgacattcctagatgcactactccgcctccttcttccggaccgacataccagtgcctgaagggaactggagagaattacaggggcaatgtggcggttactgtgtccggtcacacgtgccagcattggagcgctcagacaccccacacacacaaccgcactccagaaaattttccctgtaaaaacctggacgagaactactgtcgcaatcctgatggaaagagggcaccatggtgccataccactaattcccaagttaggtgggagtattgcaagattccgagctgcgacagttcaccggtgtctaccgagcagctggccccaactgcccctcctgaacttacgcccgtggtgcaggattgctaccatggtgatggccagtcctataggggaactagctccactaccacgacagggaaaaagtgccagagctggtcgtctatgacgccgcaccgacaccagaagactcccgagaactacccgaacgccggcctgactatgaactattgccggaatcccgacgcggacaaggggccgtggtgctttaccactgacccttctgtgaggtgggagtactgcaatctcaaaaaatgttcagggactgaagcttcagtggtagcccctccaccagtcgttttactcccagatgttgagaccccttctgaagaggactgtatgtttggaaacggaaagggctatcggggtaagagagcaacgacggtgacgggtaccccatgtcaagactgggcagcccaagagccacacagacactcaattttcactcctgaaacgaatccccgggccggcttggagaagaattattgccggaacccagacggcgatgtcggcgggccctggtgctatacaaccaaccctcggaaactatacgactactgcgacgtcccccagtgtgccgccccatcattcgactgtggcaaaccacaggtggaaccaaagaagtgtcccgggcgcgtcgttggggggtgcgtggctcatccacactcttggccatggcaggtttcactgcgtactcgatttgggatgcatttttgcggcgggactctaatttctcctgaatgggtgctgaccgcggcccactgtctggagaaatctccaagaccttcaagctataaagtaatactgggcgcgcaccaggaggtgaatctggagccccacgttcaggaaatagaggtgtcccgactgttccttgagccaacccgtaaggatatcgctctgttaaaattgagctctcccgccgtgataacggacaaagtcattcctgcttgtcttccttctcccaattacgtggtggcggacaggaccgaatgcttcatcaccggatggggcgagacccaaggcaccttcggggctggcctgcttaaagaagcccagctccccgtcatcgagaataaagtgtgcaacaggtacgagtttttaaatggccgcgtccagtccactgagctgtgtgctggccacctggccggagggaccgactcatgccagggagattcaggcggaccactggtttgctttgaaaaggataagtacatcctgcagggtgtcacatcgtggggcctggggtgtgcaaggcccaataaacctggagtctatgtgcgcgtgagtaggtttgttacatggatagagggcgtcatgcgaaacaac

SEQ ID NO: 250973 - DNA, 2430 bp, synthetic construct
  misc_feature 1..2430: note = Description of Artificial Sequence: Synthetic coding sequence
  source 1..2430: mol_type = other DNA
atggagcataaggaggtcgtactgctgctcctcctctttctgaagtccgggcagggcgagcccctggatgattatgtgaatacacaaggcgcctccctgttcagcgttaccaagaagcaactgggtgccggatccatagaggagtgcgcggctaagtgtgaggaagacgaggagttcacttgtcgcgcgttccaataccactcaaaggaacagcagtgcgtgatcatggctgaaaaccggaaaagctctatcattattagaatgcgagacgtcgtgctgttcgaaaagaaggtgtaccttagtgagtgtaagaccgggaatggcaagaactacagaggcacgatgtccaagactaaaaacggaataacgtgtcagaaatggtcatccacgagcccacatcgccctcggttctctccagcaacgcacccctccgagggcctggaggagaactactgcaggaatcccgacaacgacccccagggcccctggtgctacacaaccgaccctgaaaagaggtatgattactgtgatatcctggaatgtgaggaggagtgcatgcactgcagtggggagaattacgatggaaagataagtaagacaatgtctgggctcgagtgccaagcatgggacagccagagcccccatgcacatggctatattccgtccaagttcccgaacaagaatctgaagaagaattattgccgcaacccagaccgagaacttcgaccctggtgtttcacgacagaccccaataagaggtgggaattgtgcgatatccctcgatgcaccacacctcctcccagctctggtcctacctatcagtgcctgaagggcaccggcgagaattatcgaggtaatgtcgcggtcaccgtgtccggccacacctgtcaacactggtccgcccagaccccacacactcacaaccgaactcccgaaaatttcccctgtaaaaaccttgacgagaactactgccggaatccagatggcaagcgagcaccttggtgccacacgaccaattcacaggttcggtgggagtactgtaaaatcccatcctgcgattcatctccagtttcaaccgaacagcttgcccccactgccccccctgagctgaccccagtagtgcaggattgttaccacggagacggacagagctacaggggtaccagtagcacaacaacaaccgggaagaagtgccagtcctggagctccatgactcctcaccggcaccagaagacaccggagaactaccccaacgccggtcttactatgaactattgccgcaatcctgacgcagacaagggaccttggtgctttacgaccgatccttctgtgcgctgggaatactgcaacctgaaaaaatgtagcgggacagaggcatctgtggttgcacccccccccgtcgtcctcctccccgatgtcgagaccccttcagaagaggactgtatgtttgggaatgggaagggatatcggggcaagagagcaacaaccgttacagggacaccgtgccaggactgggcagcacaagagccccaccgccatagcatcttcactcccgagactaacccgcgggccggcctggagaagaactactgtcgaaatcccgacggcgacgtcggggggccctggtgttatactaccaatccacgcaagctctatgattattgcgacgtgccacaatgtgccgctccgtcatttgattgtggaaaaccacaggttgagccaaaaaagtgtccaggtcgcgtcgttggaggatgtgtcgcccatccacactcctggccgtggcaggtgtcattgcgcacccggttcggcatgcatttttgcggaggaaccttgataagccccgaatgggtattgacagccgcccactgtctggagaagtcaccgcggccatctagctataaagtgattctgggagcccatcaggaggttaacctcgagcctcacgtacaagagattgaggtctctcgccttttccttgagccaacacgcaaagacatcgctctcctgaagctcagttcccccgccgtgatcactgataaggtgatcccggcttgtctcccaagtccgaactatgttgtcgccgacaggactgaatgttttatcacaggttggggagagactcagggcacgttcggagctggtctgttgaaagaggctcaactgcctgtgatagagaataaggtgtgcaacaggtatgaattcctgaacggccgagttcagtcaactgagttgtgtgctggacatttggctggcggcaccgattcttgccagggcgactccggaggaccacttgtgtgtttcgaaaaagacaagtacatcctgcagggagttacctcctggggcctgggatgcgccagacccaataagccaggcgtgtacgttcgagttagcagatttgtgacctggattgagggcgtcatgcgaaacaac

SEQ ID NO: 250974 - DNA, 2430 bp, synthetic construct
  misc_feature 1..2430: note = Description of Artificial Sequence: Synthetic coding sequence
  source 1..2430: mol_type = other DNA
atggagcacaaagaagtggtgctgctgctcttgcttttcctgaagagcggacaaggcgagcctctggatgattatgtgaacacccagggagcctccctcttttccgtaacaaaaaaacagctgggcgcagggtctatagaagagtgcgccgccaaatgcgaagaggatgaggaatttacttgtcgcgctttccagtaccactccaaggagcagcaatgcgttattatggccgagaatcgcaagtcctctattattatcaggatgcgggacgtggtgctctttgaaaaaaaggtgtatctctctgagtgcaagaccggaaatgggaagaattatcgaggaaccatgagtaaaacaaagaacggtatcacctgtcagaagtggagcagcacctctccgcaccgcccccggtttagccccgctacccatccaagcgagggcctggaggagaactactgtcgtaacccagataacgacccccaaggtccttggtgttatacaacggaccctgaaaagcgctatgattactgtgacattctcgagtgtgaagaggagtgtatgcactgtagcggcgagaactacgacggcaaaatctcgaaaacaatgagcggtctcgagtgccaggcgtgggacagtcagtcaccccacgctcacggctacatccctagtaagttccccaacaagaacctgaagaaaaactattgccggaaccctgatagagaattgcgcccttggtgctttactactgaccctaataagagatgggaattgtgtgacatccctagatgcactaccccaccaccatcgagcgggccaacatatcaatgccttaaaggtacaggcgagaactaccgtggaaatgtggcagtcaccgtgagtggccacacttgccagcattggtctgcccagacaccccatacccacaacagaacaccagaaaacttcccctgtaaaaacctggacgaaaattattgtaggaatccagatggaaaacgggcaccctggtgccatacaactaatagtcaggttcgctgggagtactgtaaaattcctagctgcgactcatctcccgttagcaccgagcaactcgcccctacggctccccccgaactgactcctgtggtccaagactgctaccacggggatggacagtcttatcgtggcacttcctccacaaccaccacagggaagaagtgccagagttggagcagcatgactcctcaccgacaccagaagacacctgagaattatccgaacgccggccttacaatgaactattgtcgtaatcccgatgctgacaaggggccttggtgtttcaccacagatccctccgtcaggtgggagtactgcaacctcaagaagtgttcaggcactgaagcatctgtggtagcgcccccgcccgtagtgctgctcccagacgtcgagaccccctccgaagaggattgcatgttcggcaacggcaagggctacaggggcaaaagagctactacggttactgggacaccatgccaggattgggcagcgcaagaaccacacagacacagcatcttcacacccgagaccaatccccgcgctggactcgagaaaaattattgccgaaacccagatggcgacgtcggcggtccttggtgttacacaacaaaccctcgcaagctatacgattattgtgacgtccctcagtgtgcggcccctagttttgactgcggaaagcctcaggttgaacctaagaagtgcccggggagagtcgtgggaggctgtgttgcacacccccatagttggccttggcaagtaagcttaaggacaaggttcggaatgcatttctgtggcggcacgctaataagccctgaatgggtcttaaccgccgcacactgtctggagaagtcgcctaggccttctagttacaaagtcatcctcggcgcccaccaggaggtaaacctggagccccatgtccaggagattgaagtgtccaggctgtttttggagccaacacggaaggacatcgccctgctaaaactgtcctccccagcagtaatcacagataaggtcatccccgcatgtttgcctagccccaattacgtcgtggctgaccggaccgagtgcttcatcacaggatggggtgagactcaggggaccttcggagctgggctgctaaaagaggcacagttgccagtcattgagaataaggtttgcaatcgctacgaattcctgaacggacgcgttcagtccacagagctgtgcgcagggcacttagcgggaggaaccgattcctgtcagggagattctggagggccattggtatgctttgagaaggacaaatacatcctgcaaggggtgaccagctgggggttaggctgcgcacggccaaacaaacccggagtgtacgtccgcgtatcacgcttcgtgacgtggatcgaaggggttatgcgaaacaac

SEQ ID NO: 250975 - DNA, 2430 bp, synthetic construct
  misc_feature 1..2430: note = Description of Artificial Sequence: Synthetic coding sequence
  source 1..2430: mol_type = other DNA
atggagcacaaggaagtcgttttactgctgttgctctttttgaagtcgggacagggtgagccattggacgactatgtgaatacacagggagcctctctctttagcgtaacaaaaaagcagctgggtgcagggtccattgaggaatgtgccgctaagtgtgaagaggacgaggagtttacctgcagggccttccagtatcactcaaaggaacagcaatgtgtcattatggcggagaataggaagtctagcatcattatccgcatgcgcgacgttgtcctgttcgagaaaaaagtatatttatcagaatgtaaaacagggaacggcaaaaattaccgtggcacgatgtctaagaccaagaatgggattacatgtcagaagtggagttccacatccccgcatcgtccccgattttccccagctacgcaccccagtgaggggcttgaagaaaactactgcaggaaccctgataatgacccgcagggcccatggtgttatactacagatccagagaagcgttatgactactgcgatattctcgagtgtgaggaggagtgcatgcattgcagcggcgaaaactacgatggaaagatctctaagacaatgtcaggcttagagtgccaggcgtgggacagtcagagtcctcatgcccacggttacattccctcaaagtttcccaataaaaatcttaaaaagaactattgtcgcaaccctgatcgggagttgcgaccatggtgtttcaccaccgatccaaataaacgctgggaactttgtgacatcccgcggtgcacgacccctcctccaagctccgggcctacatatcagtgtctcaaaggcaccggagaaaattacaggggcaacgtagctgttaccgtctcaggccatacatgccagcactggagtgctcaaactccacacactcataatcgcacccctgagaactttccatgcaaaaatcttgatgagaactattgccgtaaccccgacggtaagcgggcaccctggtgccacactaccaattcccaggttaggtgggagtattgtaaaatcccctcctgtgacagctctcctgtgtctactgagcaattggctccaaccgccccgccagaactgacccctgttgtgcaagactgctatcacggcgatggacaatcctatagggggacgagctccaccacaaccaccggcaaaaaatgtcagtcttggagctctatgacaccccacagacaccagaaaactcctgagaattacccgaacgccggcctcactatgaattattgtcgtaatcccgatgcggacaagggcccatggtgcttcaccacagacccttctgtcagatgggagtattgcaatctgaagaaatgcagtggcactgaagcatccgtagttgccccaccaccggtggtgctattgcccgacgtggagaccccctcagaggaggattgtatgttcgggaacggaaagggttatcggggaaagcgggctacgactgtgacagggactccctgccaggactgggctgcacaagaacctcacaggcacagtatatttacaccagagaccaatcccagggcgggccttgagaagaattactgccgcaaccccgatggggacgttggcgggccgtggtgctacaccaccaatccacgcaagctctatgattactgcgacgtcccgcagtgtgcagcaccgtcctttgactgcggaaagcctcaagtggagcctaaaaagtgtccgggacgggttgtcggcgggtgcgtggcgcatccacacagttggccatggcaggtgtctctgaggacgcggtttggtatgcatttctgcggagggacgctgatctctccagagtgggttcttaccgcagctcactgcctggaaaagtcgcctcgcccttcttcatataaggtgatcctgggagctcaccaggaggttaatttggagccacacgtacaggaaatcgaggtgtcgcggctgttcctggaacccacacgcaaggacattgcgctcctaaagctaagctctccggctgtaattacagacaaagtcattcctgcctgcctgccaagtccaaattacgttgtagcggacagaactgagtgcttcattactggctggggcgagacacagggaacttttggtgcggggctgctgaaagaagcgcagctcccagttatcgagaataaggtatgcaatcgctatgagtttttgaatggccgcgtgcagagtaccgagctgtgcgcagggcatctagctggaggcactgattcctgccagggtgattccggcgggcccctcgtgtgtttcgaaaaggataagtacatcctgcagggagttactagctggggcttaggatgcgctcgtcccaataagcctggcgtttacgttcgcgtaagcagatttgtcacctggatagaaggcgttatgcgtaataac

SEQ ID NO: 250976 - DNA, 2430 bp, synthetic construct
  misc_feature 1..2430: note = Description of Artificial Sequence: Synthetic coding sequence
  source 1..2430: mol_type = other DNA
atggaacataaggaagtcgtcctgctcctcctgcttttccttaaatcaggacaaggtgagccacttgacgactacgtcaatacccagggagcctcactgttttcggttaccaagaagcagctgggcgcgggctcgattgaagaatgcgccgccaaatgcgaggaggacgaggagtttacttgtcgcgcgttccagtaccactcgaaagaacaacagtgcgttatcatggccgaaaaccggaagtcaagtatcatcatcagaatgcgcgacgtggtgctgttcgaaaagaaggtgtacctctcagaatgcaagaccggaaatggaaagaactatcgcggcaccatgagcaagaccaagaacggtatcacgtgccaaaagtggagcagtacctcaccgcaccgccctcgcttctctccagcgactcatccatcagaaggcttggaggaaaactactgtcgaaatccggataatgacccgcaaggaccgtggtgctataccactgatcctgagaagcgttacgattactgcgatatactcgaatgcgaagaggagtgtatgcactgctccggtgagaactacgatgggaagatttccaaaactatgtcaggactggaatgccaagcctgggacagccaatcgcctcacgcacatggctacattccgtccaagttcccgaacaagaatctcaagaagaattactgcagaaacccagacagggagcttagaccctggtgctttacgactgatcctaacaagcggtgggaactgtgcgacatcccgagatgcacgacccctccgccttccagcggaccgacttaccagtgcctgaaagggaccggcgagaactaccgaggaaacgtggccgtgactgtgtccggacatacttgtcagcactggagcgcccagaccccacacactcacaatcgcaccccagagaacttcccgtgcaaaaatctcgacgagaactactgcaggaacccggatggcaagagggcgccatggtgccatactacgaattcgcaggtccggtgggaatactgtaagatcccatcatgcgattcaagcccggtatccaccgagcagctcgcacccaccgctccgcccgagctgaccccggtcgtacaggattgctaccatggagacggacagtcctatcgcggtacctccagcaccaccactaccggcaagaaatgccagtcgtggagcagcatgactcctcaccgccaccagaaaacccccgagaactaccccaacgcggggttgactatgaactattgtcggaatccagacgcagataaaggaccttggtgcttcaccaccgacccttccgtgcgctgggaatactgcaacctcaaaaagtgttccggcactgaagcctcggttgtcgcgccacctcccgtggtgctcctccctgacgtggaaaccccgagtgaagaggactgtatgttcggcaacggaaaaggctaccggggaaagagagccactaccgtgaccggaactccttgccaagattgggcggcgcaagaaccacatcgccactcgatcttcaccccagaaactaatccgcgcgcgggactcgaaaagaactactgccgcaacccggacggggacgtcgggggtccctggtgctacactacgaatccgcgcaaactgtacgactactgtgacgtgccgcagtgtgctgccccttcgttcgactgcggaaaaccacaagtggaacctaagaagtgcccaggacgggtagtgggaggttgcgtggctcatccacattcgtggccgtggcaggtgtcactgcggactcgatttggaatgcacttttgcggagggactcttatcagccctgagtgggtgctcaccgcagctcactgtcttgaaaaatcaccaagacccagctcctacaaggtcatcctgggcgcacaccaagaagtgaacttggagccacatgtgcaggaaatcgaggtgtcgagactgttcctggaaccgacccggaaggacatcgctctgctcaagctgtcgtcccctgccgtaatcacggataaagtgatcccagcctgtctcccctcccctaactacgtggtcgctgatcggactgaatgtttcatcacgggttggggcgaaacccagggaacttttggtgccggcctgttgaaggaggctcagctgcctgtgatcgagaataaagtgtgcaacaggtacgagttcctgaatgggcgcgtgcagtcaaccgaattgtgcgccggacacctcgcaggtggaacggattcctgtcaaggagattcaggaggacccctggtctgcttcgagaaggacaaatacatccttcaaggtgtgacgagctgggggctgggatgcgcccggcctaataagccgggcgtgtacgtgagagtttcgcgcttcgtgacttggattgaaggagtgatgcgcaacaac

SEQ ID NO: 250977 - DNA, 2430 bp, synthetic construct; identical to SEQ ID NO: 250933
  misc_feature 1..2430: note = Description of Artificial Sequence: Synthetic coding sequence
  source 1..2430: mol_type = other DNA

SEQ ID NO: 250978 - DNA, 2430 bp, synthetic construct
  misc_feature 1..2430: note = Description of Artificial Sequence: Synthetic coding sequence
  source 1..2430: mol_type = other DNA
atggagcataaggaggtggtactccttctactgctctttctgaagtccggtcagggagagcctctggacgattatgtgaacacacagggggccagtcttttcagtgtgactaaaaaacagctgggggccggtagcatagaagaatgcgcagccaagtgcgaagaggacgaagagttcacgtgccgcgcgttccagtaccatagtaaagagcagcaatgtgttatcatggcagagaacagaaagtcttcaatcatcattcgcatgagagacgttgtactcttcgaaaaaaaggtatacctatccgaatgtaagactggtaacgggaagaattacagggggaccatgagcaaaacaaagaatggaatcacctgccagaagtggagctcaacctctccccatagaccccgattcagccccgctacccaccccagcgaggggctagaagaaaactactgtaggaatcccgacaacgacccacagggtccctggtgttataccaccgatccagaaaagcgatatgattattgtgatatcctggaatgtgaggaggagtgtatgcactgtagcggagagaactacgacggcaagattagtaaaacaatgagtggactggaatgtcaggcatgggactctcagtcgcctcatgcccacgggtatataccatccaaatttcccaacaaaaacttaaagaaaaattactgtagaaatcctgacagagaattaagaccctggtgctttacaactgatcccaataagcgatgggagctttgtgatatcccacgatgcacaactccaccgcccagctccggtcctacctatcagtgccttaagggaactggggaaaattacagaggcaatgtggcggtgacagtcagtggccacacttgccaacattggtctgcccagaccccccacacacataacaggactccggagaatttcccctgtaagaacctcgacgagaactactgtagaaaccccgacggtaagagagccccctggtgccacactacaaactcccaggttagatgggaatactgcaagatccctagctgtgatagctccccggtgtctactgagcaattagccccaaccgcaccacccgagctgacaccagtggtacaggattgctatcatggagacgggcaatcttataggggtacctcatcgacgacaacaactggcaaaaagtgtcagtcttggtcttccatgactccacatcggcatcagaaaactccggagaactaccctaatgccggcctcactatgaattactgcaggaatcctgacgctgataaaggaccttggtgcttcacgaccgacccctcagtcaggtgggaatattgcaatctgaaaaaatgtagtggaaccgaagccagtgtcgtggccccccctcctgtagtgctccttcccgatgtggaaacaccttccgaagaagattgtatgttcggaaacggcaaagggtatagaggcaagagggctaccaccgtaacgggcacgccttgccaagattgggcggcacaagagccccacagacacagtatctttacaccagaaacaaatccacgagctggacttgaaaagaattattgtagaaacccagatggcgacgtgggtggtccttggtgttacaccacaaacccaaggaaactgtacgattactgcgacgtgccccagtgtgctgccccaagttttgactgtggcaagccacaggtagaacctaagaagtgcccagggagagtcgtcggggggtgtgtggcccacccccactcatggccatggcaggtgagcctgcgtactaggtttgggatgcatttttgcggcggtacactcatatcacccgagtgggtgctaaccgccgcacactgccttgagaagtccccaagaccttcaagctacaaggtgatcctgggggcccaccaggaggtgaaccttgaaccccacgtgcaggagattgaagtatcccggttgttcctcgagccgacccgaaaggacatcgctttactcaaactgagtagccctgccgtgattacagataaggtgatcccagcatgtctcccgtccccaaattatgtggtggcagacagaacagaatgcttcatcacaggttggggagagactcagggaacattcggggctgggctgcttaaagaagcccagttgccagttattgaaaataaggtctgcaacaggtacgagtttttgaatggccgggtacagtccactgagttatgcgcagggcacctagcaggggggacagactcatgtcagggtgactctggaggtcccctggtctgcttcgaaaaagataaatacattcttcagggcgtgacgagttggggcctgggttgtgcaagacctaacaagcccggggtgtacgtaagagtttctagatttgtgacctggatcgagggagtgatgagaaataat

SEQ ID NO: 250979 - DNA, 2430 bp, synthetic construct
  misc_feature 1..2430: note = Description of Artificial Sequence: Synthetic coding sequence
  source 1..2430: mol_type = other DNA
atggaacacaaggaggttgtactactgctgctcctgttccttaaaagcggtcagggagaacctttagacgactatgtcaatacccagggggcctcactgttttcagttaccaagaagcagctcggcgccggttcaatcgaggagtgcgcggctaagtgcgaagaggacgaagagtttacttgccgagcttttcagtaccattctaaggaacagcagtgtgttatcatggccgagaacaggaagtccagcataatcatcaggatgagagatgtcgttctctttgagaaaaaggtctacctttcagagtgcaagacggggaatgggaagaactaccggggcactatgtctaagacgaaaaatgggatcacgtgtcaaaaatggtctagcacctcaccacaccgacctcgtttcagccccgcgacccatccatcggaggggttagaggagaattactgtcgcaatcccgataatgacccacagggcccgtggtgttatacgactgaccccgagaagcggtacgattactgcgacattttagagtgcgaggaggaatgtatgcactgtagtggtgagaactatgacgggaaaatctctaagaccatgtccggcttagagtgccaagcctgggactcccagtcaccgcacgcacacggttatattcccagtaaattccctaataagaacctgaagaagaattactgtcgcaatcccgatagggagcttcggccgtggtgcttcacaaccgacccgaataaacggtgggaactgtgcgacatccctagatgtactactcctcccccttcaagcgggccaacttatcaatgcctcaaaggtaccggtgagaactatagagggaatgtggctgtaaccgtgtctgggcacacatgccagcattggagcgcccagactccacacacgcataataggactccggagaatttcccctgtaaaaatctcgatgagaattattgcagaaatcctgacggaaagcgggccccctggtgtcacaccaccaattctcaggtgaggtgggagtattgtaagattccatcttgtgattcttcgcccgtttcaaccgaacagctcgcccccactgcccctcccgagctaactccggtggtccaagattgttaccatggtgatggacagagctaccgaggcacctcatccaccaccacaactggaaaaaaatgtcagtcctggagcagcatgaccccacacaggcatcaaaagaccccagagaactacccgaatgcgggtctaaccatgaattattgcaggaatccggatgctgataaaggcccatggtgctttaccaccgaccctagcgttcggtgggagtactgtaacttgaagaagtgttcaggaacagaagcttccgtcgtggcccccccccccgtcgtgcttttgcctgatgtagaaacacccagcgaagaggattgcatgtttggtaacggaaaaggttacaggggcaagcgcgcgactactgttacagggaccccttgccaggactgggccgcccaggagccacatcgccatagcatctttactcctgagactaatccaagagcggggctggagaagaattactgtcggaatcctgatggcgatgtcggtggtccatggtgctatacaacaaaccctcgcaagctgtacgactactgcgacgttccacagtgtgcggctccctcgttcgattgcggaaagccacaggtggagccaaaaaaatgccctggccgggtcgtgggtggctgtgtggctcatccccactcatggccttggcaggtttctctgaggactagatttgggatgcatttctgtggcgggacgcttatctcaccggagtgggtgctgacggcagctcactgcttggaaaagagcccacgcccatcctcttataaggtcatcctcggcgcccaccaggaagttaacctggagccgcacgtgcaggagatcgaagtgtctagactcttcctggaacccacgcgtaaagacatagctttgttgaagctgtcgagccctgcagtgattacggacaaagtgatacctgcttgcctgccatctcctaactacgtggttgcagatcgcaccgaatgttttatcacaggatggggagagactcagggcacttttggggccgggttgctcaaggaagcccagctaccagtgatagagaacaaggtgtgtaaccggtatgaattccttaatggaagggtccaaagtactgaactgtgcgcaggccatctggccggaggaactgactcttgtcagggtgatagtggagggcccctggtgtgctttgaaaaggataagtacatcctgcagggtgtgactagttgggggctgggatgtgctcgccctaataagcctggcgtgtatgtgcgagtatcaagattcgttacatggattgagggcgttatgcgtaacaat

SEQ ID NO: 250980 - DNA, 2430 bp, synthetic construct
  misc_feature 1..2430: note = Description of Artificial Sequence: Synthetic coding sequence
  source 1..2430: mol_type = other DNA
atggagcacaaagaggttgtcctattgttactgctgttcttgaagagcgggcagggcgaacccctcgatgattacgttaacactcagggcgcaagccttttttctgtgacaaagaaacagcttggtgccggaagcattgaagaatgcgccgcgaagtgcgaggaggacgaggaatttacttgccgtgccttccagtaccatagtaaagagcagcaatgtgtgatcatggcggaaaacaggaagtcctcaattataatccgcatgcgggatgtggtgctgttcgaaaagaaggtgtatctgagcgagtgcaagaccgggaacgggaagaattaccgggggaccatgagcaaaacaaagaatggtatcacctgtcagaaatggagtagcacctctccccaccggccgagattcagtcccgcgactcaccctagcgaaggcctggaggagaattattgcagaaaccccgacaacgatccacaaggaccctggtgttatacgactgatccagagaagaggtatgactattgtgacatcttggaatgcgaggaggaatgcatgcattgctccggggaaaactacgacggaaagatttcaaagacaatgtccggtctggaatgtcaggcatgggactctcagagcccacatgcacacggatacatcccatccaagtttccaaataagaacctgaaaaaaaactactgccgtaacccagatcgggaactgaggccatggtgctttacgaccgacccaaataagcgctgggaattgtgcgatatacctcggtgcaccacaccaccaccaagtagtggaccgacctatcagtgcctcaagggcactggagaaaattatcgaggaaacgtcgcagtcacggtgagtggccacacttgccaacactggtccgctcagactccgcacacgcataaccggacacccgagaattttccttgtaagaatctcgacgagaattactgccgcaaccctgatggcaagcgggctccatggtgtcacaccacaaatagccaagtcaggtgggaatattgtaaaattccctcctgcgactcctccccagtttccactgaacagcttgcacctactgcaccacccgagttaactccagtagtgcaagactgttatcatggcgacgggcagtcctataggggaacttcaagcactacaacaacagggaaaaaatgtcagtcttggtcatctatgactcctcaccgccatcagaaaacacccgagaactatcctaacgccgggctgaccatgaactactgcagaaatcccgacgctgacaaaggcccctggtgcttcaccacggatcccagcgtgcggtgggagtactgcaacctaaagaaatgttctggcacagaagccagcgtggtagcccctcctccagtggtactgctgcctgatgtcgagactcccagcgaagaagattgtatgttcggaaacgggaaggggtacaggggtaaaagagctactacggtgaccggcaccccatgtcaggattgggcagcccaagaaccccacaggcattccatctttactcccgagacaaacccacgggcaggtcttgaaaaaaattattgcagaaaccccgacggagatgtgggcggcccttggtgctataccaccaatcccagaaagctatatgactactgtgatgtgcctcagtgcgcggctccttcctttgactgcggtaagccacaggtggaaccaaaaaagtgtcccggacgggtcgtaggaggttgcgtggcccacccccatagctggccctggcaggtgagtcttagaactaggtttgggatgcacttttgtggaggtacattaatctccccagagtgggtccttacagctgcacactgtctggagaagagcccaagaccctcaagctacaaggttattttgggcgcccatcaggaggtcaatctagagccacacgtccaagagatcgaggtatctcggctgttcttggaacctacccggaaagacattgctctcctgaagctgtcttctcccgctgtgattacggacaaagtcatcccagcctgtctgccctctcccaattacgtcgtggccgacaggactgagtgctttattaccggatggggagaaacccaaggaacatttggtgctgggttgctaaaggaggcacagctccccgttattgaaaataaggtgtgcaaccggtatgagtttctgaacggaagggtccagtctactgagctatgcgctggccatttggctggagggactgattcttgtcaaggggattccggaggcccactcgtgtgttttgagaaagacaagtatattttgcagggcgttacaagctggggcctaggatgcgcccgccctaataagccaggcgtgtacgtgcgagtgtccagattcgtgacctggattgagggagtgatgcgcaataac

SEQ ID NO: 250981 - DNA, 2430 bp, synthetic construct
  misc_feature 1..2430: note = Description of Artificial Sequence: Synthetic coding sequence
  source 1..2430: mol_type = other DNA
atggaacacaaagaagtggtcctcctgctgctcctgttcctcaagagtgggcagggcgaaccattagacgactacgtgaacactcagggggctagcctgtttagtgtcacaaagaagcagctcggcgcgggcagcattgaggagtgtgccgcgaaatgtgaggaggacgaagaatttacttgcagggctttccagtaccatagcaaggagcaacagtgtgtgattatggcggaaaatagaaagagttcaatcatcatacggatgcgagatgtcgtgcttttcgagaagaaagtgtatctgtccgagtgcaaaacagggaacgggaagaactaccgcggcaccatgtctaaaactaagaacggaatcacatgccagaagtggtcttccacttcaccccacagacctcgcttcagccccgcaactcacccctccgaagggctggaagaaaattattgccgtaaccccgataatgatccccagggaccctggtgctacactactgaccctgagaaacgctatgactattgcgatattttggagtgcgaggaggagtgcatgcattgttcaggagagaactacgatgggaaaatcagtaaaaccatgtctggtctggagtgccaggcctgggacagccagagtcctcacgcacacggatatatacccagcaagtttcccaacaagaatctgaagaagaattactgcaggaatcctgatcgcgagctccgcccttggtgctttacaactgaccctaataagcgatgggagctgtgtgacataccacggtgtaccacaccccccccgtctagcggacccacgtatcagtgcctcaaagggacaggcgagaactatcgggggaatgtcgccgttaccgtgtcaggccacacatgccagcactggtctgcacagactccccacacacacaatcggactccggagaatttcccttgtaagaaccttgatgagaattattgccgcaatccagatggcaagagagccccatggtgccacactaccaattcccaggtccgctgggagtactgcaagattccgtcttgtgacagctctcctgtgtccactgagcaattagctcccactgcccctcccgaacttactccagtcgtccaggactgctaccatggggacgggcaatcttatcgtgggacctcttctactacgactaccggaaagaaatgccagtcttggagtagcatgacacctcaccggcaccagaaaacgcccgagaactaccccaatgcgggcctgactatgaattattgtcggaatccagacgcggacaaggggccatggtgcttcaccaccgacccctctgttcgatgggagtattgtaatttaaaaaaatgttcaggtaccgaagcgtccgtcgtggctccgccccccgtggtgttgctgccagatgtggaaacgccgtcggaagaggactgcatgtttggcaacggcaagggctatcggggaaagagagccaccactgttaccggaacaccctgccaggactgggccgcgcaagaacctcataggcattcaatctttactcccgagacaaacccccgggctggactggaaaaaaattactgtcggaaccccgacggggacgtaggtggaccgtggtgttataccacaaatccacggaaactttatgattactgtgatgtgccgcagtgtgcagctccgagctttgactgcggaaaaccacaagtcgagccaaagaagtgccccggccgggtggtaggcggatgtgtcgctcacccgcatagttggccctggcaggtctctctgagaactcggttcggcatgcacttctgtgggggaactttgatctccccagaatgggtgctcaccgccgcccactgtctcgaaaagtcgcctcggcctagtagttacaaggtcatcctgggagctcatcaggaagtgaatctagaaccccacgtgcaggagatcgaagtttcgagactgtttctggaaccaactcggaaagacatcgctctcttgaaactgtcatcccccgcggtcatcacggataaggtgattcctgcatgcctgccatccccaaattacgtggttgccgatcgaaccgagtgcttcatcacaggctggggtgagactcagggaacctttggcgccggactcctgaaggaggctcagcttcctgttatagaaaacaaggtctgcaatcgttacgaatttctgaacggccgggtgcagagcactgaattgtgcgcgggacatctagctggaggtacagacagctgccagggtgactccggcggcccactagtgtgctttgagaaagataaatatattctgcagggagttacatcatggggcctgggatgtgccaggcccaataagcccggagtgtatgtgcgcgttagtaggttcgtgacctggatcgagggagttatgcgaaataac

SEQ ID NO: 250982 - DNA, 2430 bp, synthetic construct
  misc_feature 1..2430: note = Description of Artificial Sequence: Synthetic coding sequence
  source 1..2430: mol_type = other DNA
atggagcacaaagaggtggttctgttgctcctgctgttcctcaaaagtggccagggcgagccgctggatgactatgtgaacacccaaggtgcgtctttgttcagcgtgaccaagaagcaactcggggccggttcaattgaggaatgtgccgccaaatgcgaagaagacgaagaattcacctgtcgagcttttcagtatcactccaaggaacagcaatgtgttatcatggcagagaaccgcaaaagcagcatcatcatccgcatgagggatgtggtgctgttcgagaagaaggtttacctgtccgaatgcaagacggggaatggcaagaattacaggggtacgatgagcaaaacgaagaatggtattacttgtcaaaagtggtctagcacgagccctcaccgcccacgcttctccccagcaacccacccttctgaaggactggaggaaaactactgccgcaatcccgataatgacccccaaggtccgtggtgctacacgaccgatcctgaaaagcgctacgactactgcgacatcctggagtgcgaggaggagtgtatgcactgctccggagaaaattacgatggtaaaatcagcaagaccatgtcaggtctggagtgccaggcctgggatagccagtctccgcatgcgcatggttatatcccatctaagtttccaaataaaaacctgaagaaaaactattgtcgcaacccggacagagagctgcgcccatggtgcttcaccacagacccaaacaaacgttgggaactgtgtgatattccgaggtgtacaacgcctccaccttcgagcggccctacgtaccaatgcctgaagggtaccggtgaaaattatcgtggtaacgttgccgtgacggtctctggacatacttgccagcactggagcgctcagaccccgcatacccacaaccgaactcccgaaaatttcccatgcaaaaatctggacgagaattactgtcgtaatccggatggaaaacgggcgccttggtgtcatactacgaactctcaggtacgctgggagtactgcaagatcccaagctgcgacagctctcccgtgagcaccgagcagctggcaccaacggctcccccggagttgacgccggtcgtccaggactgctatcacggggacggtcagtcatatcgcggaactagctctacgaccacgaccggcaagaaatgccagagctggtctagcatgactcctcaccgccaccagaaaactccagagaactatccaaacgccgggctgacgatgaattattgccgcaatccagacgcagataaaggtccgtggtgtttcacgaccgacccaagcgtgcgctgggaatattgcaatctgaagaagtgtagcggtactgaggcgagcgtcgttgcgccacctccagttgtcctgctcccagatgtggaaaccccatccgaggaggactgcatgttcgggaatggtaagggttaccgtggtaagcgtgctactaccgtcacgggtaccccatgtcaggattgggccgcgcaggaacctcaccgtcatagtatctttactcctgagaccaacccacgagccggcctggaaaaaaattattgccgcaatcccgacggcgatgttggcggtccgtggtgctacaccaccaacccgcgcaagctgtacgattattgcgatgttcctcagtgcgcggcaccaagctttgactgtggtaaaccacaggtggaacccaagaaatgcccaggacgcgtggtggggggatgcgtcgcacatcctcactcctggccatggcaagtgagcctccgcacccgcttcggtatgcacttctgcgggggtacgctgatttctcccgagtgggtcctgacagcagcgcattgcctggagaaatcgccacgacctagctcctacaaagtcatcctgggcgcgcatcaagaagtgaatctggagccacatgtgcaggagatagaggtttcccgcctgttcctggaaccgacccgcaaagatatcgcgctgttgaagctgtccagtcccgccgtcattacggataaagtcattccagcctgtttgccgagcccaaactatgtggtcgccgaccgtaccgaatgtttcattaccggttggggtgaaacgcaaggtacctttggagctggtctgctgaaggaagcccagctgccagttatcgagaacaaggtgtgcaatagatacgagtttctgaacggccgtgtccagagcaccgagctctgcgctggccatttggcaggcggcaccgattcttgtcaaggtgactccggcggtccattagtctgcttcgaaaaggacaagtatattctgcagggtgtcaccagctggggactggggtgcgcacggcccaacaaacccggagtctatgttagggtttcccgcttcgttacgtggattgaaggggttatgcgcaataat

SEQ ID NO: 250983 - DNA, 2430 bp, synthetic construct
  misc_feature 1..2430: note = Description of Artificial Sequence: Synthetic coding sequence
  source 1..2430: mol_type = other DNA
atggagcacaaagaggtggtgctgctgttgctgctctttctgaagtccggccagggcgaaccgttggacgactacgtcaatactcagggagcgtctctcttctctgtgactaagaagcagctcggcgcaggatccatcgaggaatgcgccgctaagtgcgaggaggacgaggaattcacttgcagagcattccagtaccacagcaaggaacaacagtgtgtcatcatggccgagaaccggaaatcatccatcattatccggatgagagacgtggtgctgttcgaaaagaaggtgtacttgtccgaatgtaagaccggcaacggcaaaaactatcgcgggactatgtcaaagacgaaaaatggaatcacttgccagaagtggtccagcacttcgccgcaccgcccgcgcttctcgcctgccactcacccgtccgaagggctggaagagaactattgccggaatccagacaacgatcctcaaggaccatggtgctacaccaccgacccagaaaagcgctacgattactgcgatatcctcgaatgtgaggaagagtgtatgcactgctccggtgaaaactacgatggaaagatcagcaaaaccatgtccgggctggagtgccaggcatgggattcgcagagcccgcacgcgcacggatacatcccttcaaaattcccgaacaaaaacttgaaaaagaactactgtcgtaacccggacagagagctccgcccttggtgcttcactaccgacccaaacaagagatgggaactttgcgacatcccgagatgtaccactcccccgccaagctctggaccaacttaccagtgtcttaagggcaccggagaaaactatcggggaaatgtggccgtgaccgttagtggacatacctgccaacactggagcgctcagacgccgcatactcataatagaaccccggagaacttcccctgcaagaaccttgatgagaactattgtcgcaatcctgacgggaagcgggcgccttggtgccataccaccaacagccaggtgcgctgggagtactgcaaaattccgtcctgtgacagctcgcccgtctccactgagcaactggctcccaccgcaccacctgagctgacccccgtcgtccaagattgctatcacggtgacggacagagctataggggaacctcatcaacgaccaccacgggaaagaagtgccaatcctggtcctcaatgactccgcatcggcatcagaaaactcccgagaattacccgaacgcggggcttaccatgaactactgcagaaacccggatgccgataagggaccctggtgctttaccactgacccgtccgtgcgctgggaatattgcaacctgaaaaagtgttccggcaccgaggcatccgtggtcgcccctccccctgtggtcctgctgcctgatgtggagactccctcagaagaagattgcatgttcggaaacggtaagggatacaggggaaagagggcgaccaccgtgaccggcaccccctgccaagattgggcagctcaggagccacatcggcactccattttcactcctgaaactaatccgcgggccggtctggagaagaattactgcaggaacccggatggtgacgtgggaggaccgtggtgctacacgaccaacccacgcaagctgtacgactactgcgacgtcccacagtgcgccgccccatcgttcgactgcggaaaaccacaagtggagcccaagaagtgcccgggcagggtcgtaggtggctgtgtggcccatcctcactcatggccgtggcaagtgagtctgcggactagatttggaatgcatttttgcggaggaaccctgatctccccggagtgggtgctgactgccgcccattgcttggaaaaaagcccacgcccgtcgtcgtacaaggtgatcctcggggctcatcaggaagtgaacctggagcctcatgtgcaagaaattgaagtgtcgagattgtttctcgaaccgactcgcaaagacattgctctcctgaagttgtcgtcgccagcggttatcaccgacaaggtgatacctgcctgcctgccttccccgaactacgtggtggcagaccggactgaatgcttcatcactggatggggagaaacccagggcactttcggtgctggcctgctgaaggaggcgcagctgccagtgatcgagaataaggtgtgcaatcgctatgaattcctgaacggacgcgtccagtccacggagctctgtgccggacatttggccggaggcaccgactcttgccagggggattccggtgggccactggtgtgtttcgaaaaggacaagtacattctgcagggcgtcacgtcgtggggactcggatgcgctagaccgaacaagcctggagtctacgtgcgcgtgagccgcttcgtgacgtggatcgagggggtgatgcgcaacaat

SEQ ID NO: 250984 - DNA, 672 bp, synthetic construct
  misc_feature 1..672: note = Description of Artificial Sequence: Synthetic coding sequence
  source 1..672: mol_type = other DNA
atgtcgcggaaaatagaagggttccttctcctgcttctgtttggttatgaggcaaccctcgggttgtctagtaccgaggacgaaggtgaagatccttggtaccagaaggcttgcaagtgtgactgtcagggtggcccaaacgccctgtggtcagccggtgccacttccctcgattgtattcccgaatgtccataccataaacccctgggatttgaaagcggagaagttaccccagatcaaattacctgttcaaaccccgagcagtacgtgggttggtacagctcgtggactgccaacaaagcacgactgaactcccaaggattcggatgtgcgtggctgtcgaagttccaggattcctcccaatggttgcagatcgatttgaaagagattaaagtgatcagcgggattctgactcaaggtagatgtgatattgatgaatggatgaccaagtactccgtgcaatacagaactgacgaacgacttaactggatctactacaaggaccaaaccggaaataacagagtgttctacgggaactcagatagaactagcaccgtgcaaaacctgcttcgcccgcccatcatctctcgattcatcaggctcatcccactgggatggcatgtccggatagcaatccgcatggagcttctcgagtgtgtgagcaagtgtgcg

SEQ ID NO: 250985 - DNA, 672 bp, synthetic construct
  misc_feature 1..672: note = Description of Artificial Sequence: Synthetic coding sequence
  source 1..672: mol_type = other DNA
atgtctaggaaaatcgagggattcttgttgctgttgctgttcggctatgaggctactttgggattgagttctaccgaggacgagggagaagacccctggtatcagaaggcatgtaagtgcgactgtcaaggaggtcccaatgccctgtggagcgctggcgctacatctctcgattgcatacccgagtgtccctatcacaagcccctgggcttcgaatccggagaggtgacccccgaccagattacttgctcaaaccccgagcaatatgtaggatggtattcttcttggacagccaacaaggctcgtctcaatagccaaggtttcggatgcgcttggctctctaaatttcaggactcctcccagtggctccagatcgatctgaaagagattaaggtgatttctggcatcttgacacagggaagatgcgacatcgacgagtggatgaccaaatatagtgttcaataccgcaccgatgagcgtctcaactggatctattacaaggatcagactggcaacaaccgtgtgttttatggcaatagcgatagaacctccacagtgcagaacctgttgagacctcccattatttcccgcttcatacgtctgatccccctgggttggcacgttcgcattgctatcaggatggagttgctcgaatgcgtctccaaatgcgca

SEQ ID NO: 250986 - DNA, 672 bp, synthetic construct
  misc_feature 1..672: note = Description of Artificial Sequence: Synthetic coding sequence
  source 1..672: mol_type = other DNA
atgtcacggaagattgaggggtttctgttgctcttgttgttcggatacgaggcaacgctcgggctctcctctacggaggatgagggggaggacccctggtaccagaaagcctgtaagtgtgattgccaggggggcccaaacgcactgtggtcagcaggggccactagtctggactgtattccagagtgtccttaccacaagcccctgggctttgagtcgggagaagtcacccctgaccagattacttgctctaaccccgagcaatatgttgggtggtactccagctggaccgccaacaaggctagactgaactctcaggggttcgggtgcgcgtggttatcgaaattccaggattcttcacagtggctccagatcgacctgaaggaaattaaggtgatcagcgggatcttgactcagggacggtgtgacatcgacgaatggatgactaagtactctgttcagtaccgaacagatgagagattgaattggatatattacaaagatcagaccgggaataatagagttttttacggaaactctgaccgcactagcaccgtgcagaatctccttagacccccgatcatttctcgatttatacgactaatccccctgggatggcatgtgcgcattgccattaggatggagctactggaatgcgtgtcaaagtgtgct

SEQ ID NO: 250987 - DNA, 672 bp, synthetic construct
  misc_feature 1..672: note = Description of Artificial Sequence: Synthetic coding sequence
  source 1..672: mol_type = other DNA
atgagtcggaaaattgagggatttctgctcctgcttttgttcggatacgaggccaccctggggctcagctcaactgaagatgagggcgaagacccttggtatcagaaagcatgtaagtgtgattgtcagggcggtcctaacgctctgtggtccgctggtgctacaagcctggattgcatcccagagtgtccctaccacaaacctctcggatttgagagtggggaagttacaccagatcagatcacttgttcaaaccctgagcagtatgtgggttggtactcttcttggacagcgaataaagcaagacttaatagccagggattcggctgcgcatggctcagtaaattccaagactcaagccagtggctccagatcgacctcaaagagattaaggtgataagcgggatcctgactcaaggccggtgtgatatcgatgagtggatgaccaaatattccgtgcaatacagaaccgacgaaaggctgaactggatctattacaaggatcagacaggcaacaatagagtgttttatggaaattcagaccggacgtccaccgtccagaatctcctgaggcctcctatcatcagccggttcattcgactgattcctctgggttggcatgtgagaatcgccatcaggatggaactgcttgagtgcgtctctaaatgcgca

SEQ ID NO: 250988 - DNA, 672 bp, synthetic construct
  misc_feature 1..672: note = Description of Artificial Sequence: Synthetic coding sequence
  source 1..672: mol_type = other DNA
atgtctcggaagatcgaaggattcttgctgctccttctgtttggttacgaggcgactctcgggcttagctccactgaggacgaaggagaggatccgtggtaccagaaggcgtgcaagtgcgactgtcaaggcgggccaaacgcactgtggagcgcaggagccacctcactggactgtattccagaatgcccgtatcataaacctctggggtttgaaagtggcgaagtgaccccggatcaaatcacctgtagcaaccctgagcaatacgtgggttggtactcctcttggaccgcgaacaaagccagactcaattcacagggtttcggttgcgcctggttgagcaagttccaggactcatcccagtggttgcagatcgacttgaaggagataaaagtcatcagtggcatcctgactcaaggccgctgcgatatcgatgagtggatgacgaagtactcggtccagtaccgaacggatgaacggctgaattggatctactacaaagaccagaccggcaacaatagagtgttctacggaaactcagaccgcacctcgactgtccaaaacctgctgcggccgcccatcatttccaggttcatcaggctgataccactcgggtggcacgttcgcatcgctattcgtatggaactcctggagtgcgtgagcaagtgcgcc

SEQ ID NO: 250989 - DNA, 672 bp, synthetic construct
  misc_feature 1..672: note = Description of Artificial Sequence: Synthetic coding sequence
  source 1..672: mol_type = other DNA
atgtcgagaaagattgaaggctttctgcttcttctcctgtttggatacgaagccactctgggactctcctcgaccgaagatgaaggggaggacccatggtatcagaaggcctgcaaatgtgattgtcagggcggccctaacgcactttggtccgcaggagctacttcccttgattgtattccagaatgtccttaccacaagccacttggttttgagagcggagaggtcaccccggaccaaattacttgttcaaacccagaacagtacgtgggttggtactcttcgtggactgcaaacaaggcccggctcaacagccagggattcggatgtgcctggctgtcgaagtttcaagattcgagccaatggctccaaatcgacctcaaagaaatcaaggtgatttctggaattctgactcaaggaaggtgtgatattgatgaatggatgaccaagtactccgtgcaataccggactgacgaaagacttaattggatctactacaaggaccaaaccggtaataaccgggtcttttacggaaattcggataggacctcaaccgtgcagaaccttctgcgcccgcctatcattagccggtttattcgcctgattcccctcggttggcacgtgcggatcgctattcggatggaattgctggaatgcgtttcaaagtgtgca

SEQ ID NO: 250990 - DNA, 672 bp, synthetic construct
  misc_feature 1..672: note = Description of Artificial Sequence: Synthetic coding sequence
  source 1..672: mol_type = other DNA
atgtcaaggaagatagaaggcttcctgctgcttctcctgttcggttacgaagccactctgggcctctcgagcactgaggacgagggcgaggacccgtggtaccagaaagcctgtaagtgcgattgtcagggcggaccaaatgcgctctggtccgccggcgcgacctcactcgattgcatcccggaatgcccctaccataagccgctgggtttcgaatccggagaagtgacccctgaccagattacgtgctccaatccggagcaatacgttggatggtactcgtcatggaccgcgaacaaggccagactgaactcgcagggcttcggatgcgcgtggttgtcgaagtttcaagacagctcacagtggctgcagattgacctcaaggagataaaggtgatttcaggcatcctgacccaaggacggtgtgatatcgatgaatggatgaccaagtactctgtccagtaccgcaccgacgaacgcctgaactggatctactacaaggatcagaccggaaacaaccgggtgttctatggaaactcagatcgcacttcgacggtccagaatctgctccggccaccaatcattagccgctttatcaggctgatcccgctcggttggcacgtccgaatcgccatccgcatggagctgctggagtgtgtgtccaaatgtgca

SEQ ID NO: 250991 - DNA, 672 bp, synthetic construct
  misc_feature 1..672: note = Description of Artificial Sequence: Synthetic coding sequence
  source 1..672: mol_type = other DNA
atgtcaaggaagatcgaaggctttctcctcctgctgctgttcggatatgaagctaccctgggtctttcctctacagaggatgaaggggaggacccatggtaccagaaagcatgtaaatgtgactgtcagggaggccccaacgctctgtggagcgccggagcgacttcactcgactgtatcccagagtgcccttaccataaaccactgggctttgagtcaggcgaggtgacaccagatcaaattacctgcagcaaccctgaacagtatgttggttggtacagcagttggacggcaaacaaggcccgactgaactcacagggcttcgggtgcgcatggctttccaagttccaagattcctcgcaatggctccagattgacctcaaagaaattaaagtgattagtggaattttaactcagggacgctgtgacattgatgaatggatgaccaagtactccgtgcagtacagaactgatgagcgcctgaattggatatactacaaggaccaaacaggaaataacagagtgttctatgggaactccgaccgaactagcacagttcagaatttgttgaggcctccaatcatctcccggttcatccgcctgatccctctagggtggcatgtgcgtatcgccattaggatggaactcctggagtgtgtgtctaagtgcgcc

SEQ ID NO: 250992 - DNA, 672 bp, synthetic construct
  misc_feature 1..672: note = Description of Artificial Sequence: Synthetic coding sequence
  source 1..672: mol_type = other DNA
atgtccagaaagatcgaaggattcctgctgttgctgctcttcgggtacgaagcgactctcggactctcgtccactgaggacgaaggggaggacccttggtaccaaaaagcatgcaagtgtgattgtcaaggagggccgaacgcactctggtcagccggtgcaacctcgctggactgtattcctgaatgcccataccacaagccgctgggctttgagtctggagaggtgacccccgatcagattacttgttcgaacccagaacagtacgtgggctggtactcgtcatggacggccaataaggctcgcctgaattcccaagggttcggatgcgcgtggctgagcaaatttcaggactcgtcgcaatggctccaaattgatcttaaagagatcaaggtcatctcaggaatcctgacccaaggacggtgcgatatcgacgagtggatgaccaagtactcagtgcagtacaggacggacgagcgcctgaactggatatactacaaagaccagactggcaacaatcgggtcttttatggaaattctgatcgcacctcgactgtccagaaccttctgaggccgccgattatctctaggttcatccgcctgatcccgctgggatggcatgtgcggatcgccatcagaatggagctgctcgagtgcgtgagcaagtgcgct

SEQ ID NO: 250993 - DNA, 672 bp, synthetic construct
  misc_feature 1..672: note = Description of Artificial Sequence: Synthetic coding sequence
  source 1..672: mol_type = other DNA
atgagtaggaagattgagggcttcctgttgcttttgctattcggctacgaagccaccctcgggttatccagcacagaagacgaaggcgaggatccctggtatcaaaaggcctgtaagtgtgattgccaaggcggcccaaacgcactttggagtgctggagccacatctctggattgtatccctgagtgtccttaccacaaacccctagggtttgaatcaggagaagtgactccggatcagatcacgtgctctaacccggaacagtacgttggttggtattcctcttggactgccaacaaagcacgactcaactcacaagggttcggatgcgcctggctgtctaagtttcaggattcctcacagtggctgcagatcgacctgaaggaaatcaaggtcattagcggaatactgactcaaggccggtgcgacattgatgagtggatgacgaagtactcagtacaatataggaccgatgagaggctgaattggatctactacaaagaccagacaggcaataaccgggtgttttatggcaacagtgataggacaagtaccgtccagaacctgcttcgaccgcccatcatctcacgcttcatccgcctcatcccgctgggctggcatgttaggattgccataagaatggaactcttggagtgtgtgagtaagtgtgcg

SEQ ID NO: 250994 - DNA, 672 bp, synthetic construct
  misc_feature 1..672: note = Description of Artificial Sequence: Synthetic coding sequence
  source 1..672: mol_type = other DNA
atgtcacgcaagatcgaggggtttctgcttctgctcttgttcgggtacgaagctacactggggttgtctagtacagaagatgagggagaggatccatggtaccagaaggcatgtaaatgtgattgccagggcggtccaaacgctctctggagtgccggcgccacctcactggactgcattcccgagtgcccctatcacaagcctttaggctttgaaagcggcgaggtcaccccagatcagatcacctgctctaaccccgagcagtacgtcgggtggtattcctcttggacagcaaataaagcccgtcttaattctcaaggatttggttgcgcatggttgtccaagttccaggactcatcccagtggctgcagatcgatcttaaagagataaaagtcatctcaggaatcctcacacagggacgttgtgatatcgacgagtggatgaccaaatatagtgtacaatatcgtacagatgagcgcctgaattggatctactataaggaccaaacaggcaataatcgggtgttttacggcaactctgacaggacatctaccgtccagaacctgctgcgaccgcctattatctctaggtttattaggctcatcccactgggctggcacgttcggatcgccataaggatggaactgctggagtgtgtatcaaaatgtgca

SEQ ID NO: 250995 - DNA, 672 bp, synthetic construct
  misc_feature 1..672: note = Description of Artificial Sequence: Synthetic coding sequence
  source 1..672: mol_type = other DNA
atgagcagaaagattgaaggattcttgctgttactgctgttcggttacgaggccaccttaggcttgtccagtacggaagacgagggcgaggacccatggtatcagaaggcctgtaagtgtgattgccaaggaggccccaacgccctgtggtccgctggagccacgagcctggactgtatcccagagtgcccctaccacaagccactcggctttgaatccggagaagtgactcccgatcagataacatgttccaatcccgagcagtatgtcggatggtattctagctggacagccaacaaggctcgattgaacagccaggggttcggttgcgcctggctgagcaaatttcaggactcttcacaatggttacagattgacttgaaagaaatcaaagtgatttctgggatcctgacccaaggccgatgtgatatcgacgagtggatgactaaatattccgtccagtatcgaacggatgaaagactcaactggatctattataaagaccagacgggcaacaacagagtcttctatgggaatagtgaccgaacgagcacagtgcagaacctgcttcggccccctatcatctctaggtttattaggctgatccctctcggatggcatgtaagaattgctataagaatggagctgcttgagtgtgtgagtaagtgcgct

SEQ ID NO: 250996 - DNA, 672 bp, synthetic construct
  misc_feature 1..672: note = Description of Artificial Sequence: Synthetic coding sequence
  source 1..672: mol_type = other DNA
atgtcacgaaaaattgagggattcctcctgcttctcttattcgggtatgaagctacattaggactatcaagtactgaagatgaaggggaagatccctggtatcagaaagcttgtaagtgtgattgtcagggaggacccaacgctctttggtctgccggagccacatctctcgactgtattcccgaatgcccttaccataaaccacttggattcgaatctggggaagtcactcctgatcagatcacatgctccaaccctgaacaatatgtaggatggtattcttcctggactgctaataaagctaggctgaactctcaggggtttggatgcgcctggctctctaaatttcaggatagtagtcagtggctccaaattgatttgaaggaaataaaagtaatatctgggatcctcactcagggacgctgcgacatagatgaatggatgacaaaatactcagtccagtaccgaacagatgaacgcctaaactggatatattacaaagatcagacaggaaataatcgggtgttctatggaaacagtgaccggacttctactgtacagaacctgttaagaccaccaatcatatcgaggtttatcagactcatccctttggggtggcacgtccgaatagctataaggatggaattactcgaatgtgtatctaaatgcgct

SEQ ID NO: 250997 - DNA, 672 bp, synthetic construct
  misc_feature 1..672: note = Description of Artificial Sequence: Synthetic coding sequence
  source 1..672: mol_type = other DNA
atgtctcgtaagatagagggttttttgcttctgctcctcttcggttatgaagctactctggggcttagttccacagaggatgaaggcgaagatccttggtaccagaaagcctgcaagtgcgactgtcaggggggcccaaatgcactgtggtcagctggcgctacatccctggactgtatccccgagtgtccttaccacaagcccctgggcttcgaaagcggtgaggtcacacctgatcagatcacctgcagtaatcccgagcagtatgtgggctggtactcctcctggaccgcaaacaaggctaggctcaacagccagggatttggctgcgcttggctcagcaaattccaggatagctcccagtggctgcagattgatctgaaggagattaaagttatctctggtatcctgacccagggcaggtgtgacattgatgaatggatgaccaagtatagtgtgcagtacaggaccgatgaaaggcttaactggatttactataaggatcagactggcaataaccgtgtgttctacgggaactccgatcgaaccagcactgtgcagaatctattaaggccccctattataagccgcttcatcagattgatccccctgggctggcatgtcagaatagccatccgaatggaattgctagaatgcgtgtctaagtgtgct

SEQ ID NO: 250998 - DNA, 672 bp, synthetic construct
  misc_feature 1..672: note = Description of Artificial Sequence: Synthetic coding sequence
  source 1..672: mol_type = other DNA
atgtcgcgcaagatagagggatttctgctgcttcttctgttcggatatgaagctactctcggactctcctcgaccgaggatgagggggaagatccttggtaccagaaggcatgcaagtgcgattgccaaggaggcccgaacgccttgtggagcgccggtgccacgtcgctcgactgtattcctgaatgtccatatcacaaaccattgggctttgaatcaggagaagtgactccagaccagattacctgctcgaaccctgagcaatacgtcggatggtactcctcctggacggcgaacaaggccaggcttaattcgcagggattcgggtgcgcatggctgtctaagtttcaagactcgtcacagtggctccagatcgacctgaaggagatcaaagtgatctccggcatcctgacccagggacggtgtgacatcgacgagtggatgactaaatactcggtgcaatacaggacggatgagcggctgaactggatctactacaaagaccagactggtaacaatagagtgttctacggtaattccgataggacctctactgtgcaaaacctgctccggccccctataatctcaagatttatcagactcatcccgctgggctggcacgtgcgtattgcgatccgcatggagctgttggaatgtgtttccaagtgcgct

SEQ ID NO: 250999 - DNA, 672 bp, synthetic construct
  misc_feature 1..672: note = Description of Artificial Sequence: Synthetic coding sequence
  source 1..672: mol_type = other DNA
atgtcacgaaagatcgagggctttcttttactgctgttattcgggtatgaggccacactgggcctgagctccaccgaggacgagggtgaggacccatggtatcagaaggcctgcaagtgcgactgtcagggcggtcctaacgcactatggtcggccggcgcaaccagtctcgattgcattcctgaatgcccttaccataagccactggggttcgagtcaggggaggtaactcctgatcagataacctgttccaatccggaacaatacgtcggctggtactcttcctggacagccaataaggccaggctgaatagccagggatttggctgcgcatggttatctaagttccaggactcctctcagtggctccaaatcgatctgaaggaaattaaggtaattagtggtatcttgacccaggggaggtgcgacattgacgagtggatgacgaagtattcggtacagtaccgcactgacgagcgacttaactggatctattacaaggatcagaccggaaataacagggtgttctacgggaattctgaccgaacttctactgttcagaaccttctccgaccgccaatcatttccaggttcattcgactaatccctcttggctggcatgtccggatcgctattagaatggaactgctcgagtgcgtcagcaagtgtgcc

SEQ ID NO: 251000 - DNA, 672 bp, synthetic construct
  misc_feature 1..672: note = Description of Artificial Sequence: Synthetic coding sequence
  source 1..672: mol_type = other DNA
atgtcacgcaagattgaaggtttcctgcttctgttgttatttggctacgaggccactcttggtctgagcagcacagaagatgaaggagaagatccgtggtaccagaaggcttgtaaatgcgattgccagggaggtcctaacgcattgtggtctgcaggcgcgacgtctcttgattgtattccagagtgcccctaccataaaccactcggcttcgaatccggagaagtcacgccggaccagatcacctgcagcaatcctgagcaatacgtcggctggtatagcagttggacggcaaataaagcacgcttaaattcacaaggttttggttgtgcatggctttcaaagtttcaggacagctcccagtggttgcagattgatttgaaagagatcaaggtaattagcggtatacttacgcaaggcagatgtgatatcgatgagtggatgacaaaatatagcgtgcaataccggacggacgaaagattgaactggatctattataaggatcagacagggaataatagagtattctatggaaatagcgacagaacgtctacagtgcaaaatttgcttcgcccgccgataattagccgcttcatacgtcttattcctctaggatggcatgtacgtattgccatacgtatggaacttcttgagtgcgttagcaaatgcgca

SEQ ID NO: 251001 - DNA, 672 bp, synthetic construct
  misc_feature 1..672: note = Description of Artificial Sequence: Synthetic coding sequence
  source 1..672: mol_type = other DNA
atgtcaagaaagatcgagggctttcttcttcttctgctgtttggatatgaagcaaccctgggactgtcatccaccgaagatgaaggggaagatccttggtaccaaaaggcatgtaagtgcgattgtcagggcggaccaaacgctttgtggtcagctggagcgaccagcctggactgtattccggagtgtccctaccataaaccacttggatttgagtcgggagaagtgacccctgatcaaattacgtgctcaaaccctgaacaatacgttggttggtactcgtcctggaccgcaaacaaggcacggctgaactcgcagggattcggttgtgcatggctgtccaaattccaggacagctcgcaatggctgcagattgatcttaaagaaatcaaagtgattagcgggatcctcactcaaggccgctgtgatatcgatgaatggatgacgaagtactcggtccagtacagaactgacgaaaggcttaactggatttactacaaggaccaaactggtaataaccgggtcttttacgggaactcggatcgcacttcgaccgtgcagaacctgcttcgccctcccatcatttcgcggttcatccggctgattcctcttgggtggcacgtgcggatcgcaatcaggatggagctgctcgaatgcgtgtctaaatgcgcg

SEQ ID NO: 251002 - DNA, 672 bp, synthetic construct
  misc_feature 1..672: note = Description of Artificial Sequence: Synthetic coding sequence
  source 1..672: mol_type = other DNA
atgagtagaaagattgaaggattccttttattattgttattcggatatgaagctactcttgggttaagtagtacagaagatgaaggtgaagatccttggtatcaaaaggcatgcaaatgtgattgtcaaggagggcctaatgcattatggtcagctggagcaacttctttagattgtattccagaatgtccatatcataaacctttaggatttgaatcaggagaagtgactcctgatcaaattacatgtagtaatcctgaacagtatgttggttggtattcatcatggactgctaacaaagctagattaaattcacaagggtttggttgtgcttggttgtctaaatttcaagattcaagtcaatggttacaaattgacttaaaagaaattaaagttatttctggaattttaactcaaggaagatgtgatatcgatgaatggatgactaaatattcagttcaatatagaacagacgaaagacttaactggatttattataaagatcaaacaggtaataatcgtgtattttatggaaattctgatagaacatcaacagttcaaaatcttttacgacctccaataatttcaagatttattagattaatacctcttggatggcatgttagaattgcaattagaatggagcttcttgaatgtgtttcgaagtgtgct

SEQ ID NO: 251003 - DNA, 672 bp, synthetic construct
  misc_feature 1..672: note = Description of Artificial Sequence: Synthetic coding sequence
  source 1..672: mol_type = other DNA
atgagcagaaagattgaaggctttttgctcctcctgctgttcgggtacgaagcaactctgggactttcgtcgactgaggacgaaggtgaagatccatggtaccaaaaggcttgtaaatgtgattgtcagggcggacctaatgcactgtggtcggccggggcaacgtcgctggattgtattccggaatgcccttaccataagcctcttggatttgaatccggagaggtgaccccggaccagatcacctgcagcaacccagaacaatacgtgggctggtactcgtcttggactgccaacaaggcaagactcaattcccagggtttcgggtgtgcatggcttagcaaatttcaggactcgagccaatggctgcaaattgatctgaaggagattaaggtgatttccggcattcttactcaagggcgctgtgacattgatgagtggatgactaagtacagcgtgcaataccgaactgacgaaagactgaattggatttactacaaggatcagactggaaataaccgagtgttttacggaaactccgataggaccagcacggtgcaaaatctgttgcgacctcccatcatcagccgtttcatccgccttattccactgggttggcatgttagaatcgcaattcgtatggaactgttggaatgcgtttcaaaatgcgca

SEQ ID NO: 251004 - DNA, 672 bp, synthetic construct
  misc_feature 1..672: note = Description of Artificial Sequence: Synthetic coding sequence
  source 1..672: mol_type = other DNA
atgtcccgtaagatcgaggggttcctcctgttgctgctctttggctacgaagccaccttgggactgtcgtccaccgaagatgaaggggaggatccgtggtaccagaaggcttgtaagtgcgactgccaaggcggacctaatgctctgtggagcgccggagctacctcattggactgcatcccggagtgtccttaccacaagccactggggttcgagtcgggagaggtgactccagatcagattacctgctcaaacccagaacaatacgtgggatggtactcgtcatggactgcgaataaggcccggctcaactcccagggattcggatgcgcttggctgtcgaagttccaggactcctcgcagtggttgcagatcgatcttaaagagatcaaggtcatttcaggaatcctgacccagggaaggtgcgacatcgatgaatggatgacgaaatactccgtgcaataccggaccgacgaaagactgaactggatctactataaagaccagaccggaaataaccgggtgttctacggaaacagcgaccgcactagcaccgttcaaaacttgctcaggccgccaatcatctcaagatttatccgcctgatcccgctcggctggcacgtgcgcatcgccattcggatggaactgctggaatgcgtgtccaaatgcgcg

SEQ ID NO: 251005 - DNA, 672 bp, synthetic construct
  misc_feature 1..672: note = Description of Artificial Sequence: Synthetic coding sequence
  source 1..672: mol_type = other DNA
atgagccgtaaaattgaagggttcctgttattgctgctgttcggttatgaggcaacactggggctgagtagcaccgaagacgagggagaagacccctggtatcagaaggcttgtaaatgtgactgtcagggcggtcctaatgccctgtggagtgcaggcgccacttctttggactgtataccagagtgcccatatcataagccccttgggttcgagtccggcgaagtgacaccagaccagattacgtgttcaaaccccgaacagtatgtgggatggtactcatcctggactgcaaacaaggcacgacttaattctcagggtttcggctgcgcatggctctcaaagtttcaagattcctctcagtggctacagatcgacctgaaagaaatcaaagttattagtggaattttgacccagggaagatgcgacatcgatgaatggatgaccaagtacagcgtgcagtatcggacggacgagagacttaattggatctattataaggatcagaccggaaataatagagtgttttacggcaattctgataggacgagcactgttcagaacctgctgcgtccacccataatctcacgatttatccggctgatacctttaggctggcacgtcaggatcgctattaggatggaactcctggagtgtgtgtcaaagtgcgcc

SEQ ID NO: 251006 - DNA, 672 bp, synthetic construct
  misc_feature 1..672: note = Description of Artificial Sequence: Synthetic coding sequence
  source 1..672: mol_type = other DNA
atgtcaagaaagattgaaggttttcttctccttcttctgttcgggtacgaggctacgcttggactgagctccactgaagatgagggtgaagatccttggtaccaaaaggcatgtaagtgcgactgtcagggaggaccaaacgcactgtggtcggcgggcgccaccagcctggactgcattcctgaatgtccataccataaaccccttgggtttgagtcgggtgaagtcactcctgatcagataacctgttcaaaccctgagcaatacgtgggttggtactcgtcgtggaccgcaaacaaggccagactcaattcccaaggatttggttgcgcatggttgtccaagtttcaagattctagtcaatggctgcagattgacctgaaggagattaaggtgattagcggtatcctcacgcaaggcagatgtgatatcgatgagtggatgactaagtacagcgtacaatacagaaccgatgaaagactgaattggatctactataaggaccagaccggcaataaccgagtgttctatggaaattcggatcggaccagcaccgtgcagaacctgttgcgtccccccataatcagcagattcatccggctcatccctcttggctggcacgtgcggattgccatacgaatggaactgcttgagtgcgtgtcaaaatgtgcc

SEQ ID NO: 251007 - DNA, 672 bp, synthetic construct
  misc_feature 1..672: note = Description of Artificial Sequence: Synthetic coding sequence
  source 1..672: mol_type = other DNA
atgagtagaaaaattgaagggttcctgctgctcctcttgtttgggtacgaggccactcttggtctcagctccacggaggacgagggggaagacccctggtaccagaaggcctgcaagtgcgactgtcagggaggtccgaatgccctgtggtccgccggcgcaacctctctggattgcattcctgagtgcccgtatcataagcccctgggatttgagtccggcgaggtaaccccagaccagattacatgctcaaaccctgagcagtatgtgggttggtacagttcctggaccgccaacaaagcccgcttgaactcgcaggggtttggctgtgcctggctgtccaagtttcaggattcgagccagtggctgcagattgatcttaaagagataaaggtgattagcgggatcctaacacaaggacgctgtgacatcgatgaatggatgacaaaatactccgtgcagtacaggacagacgaacggttaaattggatatattataaagaccagaccggcaataaccgagtgttttatgggaacagcgaccgaacaagcaccgtccagaacctgcttagaccaccgatcatctcaaggtttatccggctcatccccctgggatggcatgtccggatcgccattcggatggagcttctggaatgtgtgtctaagtgtgct

SEQ ID NO: 251008 - DNA, 672 bp, synthetic construct
  misc_feature 1..672: note = Description of Artificial Sequence: Synthetic coding sequence
  source 1..672: mol_type = other DNA
atgagcaggaagattgaaggttttcttctgctcctgctgtttggttacgaggcaaccctcggtctttcgagtaccgaggacgagggcgaagatccgtggtaccagaaagcctgcaagtgcgactgtcaaggcggtccgaacgccctttggtcggcaggcgcgacttcactggattgcatcccagagtgtccttaccacaaaccactgggtttcgaatcgggggaggtgactcctgaccagatcacctgttcgaaccctgaacaatatgtgggatggtacagctcatggacggcaaacaaggccagactgaactcccaaggttttggttgtgcatggctttccaaatttcaagatagctcccaatggctgcagattgatctgaaggaaatcaaggtcatctccggaatactcactcaaggtcggtgtgatattgatgaatggatgaccaaatactcggtccagtaccggaccgatgaaagattgaactggatttactacaaagaccagaccggtaataacagagtgttttatggaaattcggataggacgtcaaccgtgcaaaacctccttagaccgcctatcatttcgaggtttattcgcctgattccccttgggtggcatgtccgtatagcaattaggatggaacttcttgaatgcgtgtcgaaatgtgca

SEQ ID NO: 251009 - DNA, 672 bp, synthetic construct
  misc_feature 1..672: note = Description of Artificial Sequence: Synthetic coding sequence
  source 1..672: mol_type = other DNA
atgtctcgcaaaatagagggctttcttcttctcttgctcttcggctacgaagctactctgggtttgtcttcaacagaggacgaaggcgaggatccctggtatcagaaagcctgtaagtgcgattgtcagggtggacccaacgctctttggtcggccggggcaacgtcgctggactgcatcccagagtgcccttatcacaaacctctgggattcgaaagtggtgaggtaacccctgatcagatcacctgttctaatcctgagcagtacgtgggatggtattcctcatggaccgcaaacaaggccaggctcaactcacagggctttggttgtgcgtggctgtcaaagttccaggactccagccagtggttgcagatcgatctgaaagagattaaagtcatcagcgggattctgacccagggcagatgtgatatcgatgaatggatgaccaaatatagcgtgcagtaccggacagacgaacgtttaaactggatatactataaagaccagacagggaataacagggtcttctatggaaactccgataggacctcaaccgtgcagaatctgcttagacccccaattatatcccgttttatcagactcattccactcggatggcacgtgcgcatagcaataagaatggagttgcttgagtgcgtgagtaaatgcgct

SEQ ID NO: 251010 - DNA, 672 bp, synthetic construct
  misc_feature 1..672: note = Description of Artificial Sequence: Synthetic coding sequence
  source 1..672: mol_type = other DNA
atgtcacgcaagatcgaggggtttctgctgctcctgctgttcggatatgaggctaccctcggtttgagcagcactgaagatgaaggcgaggacccttggtaccagaaggcatgtaagtgtgattgccaaggtggaccgaacgctctctggtccgcgggagcaacttcgctggactgcattcctgagtgcccctatcacaagccacttggattcgaatcgggagaagtgacgccggaccaaattacctgctcgaatccagagcagtacgtaggctggtacagcagttggaccgccaacaaggcccggctgaactcacaaggattcgggtgcgcctggctttcaaagttccaggacagctcgcagtggcttcaaattgacctgaaagaaatcaaagtgatcagcggcatcctgacccagggtcgctgcgatatcgatgaatggatgaccaagtattcagtccaataccgaaccgacgagcggctgaattggatctactataaagaccagacgggcaacaacagggtgttctacggtaactcagaccggacttccactgtccaaaacctgctgcgccctcctattatctcacgcttcatcagactcattccattgggctggcatgtgcgcatcgccatcaggatggagctcctggaatgtgtctcgaagtgcgct

SEQ ID NO: 251011 - DNA, 672 bp, synthetic construct
  misc_feature 1..672: note = Description of Artificial Sequence: Synthetic coding sequence
  source 1..672: mol_type = other DNA
atgtcccggaagattgagggcttcctgctcctcctgctgttcggatacgaagcaacactgggcctgagcagcacagaagacgaaggcgaggacccctggtatcagaaagcctgcaagtgtgattgtcagggaggacccaacgcactgtggagcgccggcgctacctctctcgactgcatcccggagtgtccataccataagccgcttggcttcgagtccggggaggttaccccagaccagattacttgctctaaccccgagcagtatgtggggtggtacagcagttggaccgcaaataaggcacgcctcaattcccagggttttggatgtgcctggctgtccaaattccaggactcctcacagtggcttcagatagatctgaaagagataaaggtgataagcggcatccttacccaaggcaggtgcgatatcgacgagtggatgaccaagtacagtgtgcaatataggaccgatgaacgattgaattggatctattacaaagaccaaacggggaacaaccgggtgttctacggaaactcagatcgcaccagcacagtgcagaatttgctccgccctcctataatttccagatttatccgccttatccctctgggctggcacgtaaggatcgcaattcgcatggagctcctggaatgcgtttcaaagtgcgct

SEQ ID NO: 251012 - DNA, 672 bp, synthetic construct
  misc_feature 1..672: note = Description of Artificial Sequence: Synthetic coding sequence
  source 1..672: mol_type = other DNA
atgagccggaagatcgaaggttttctcctcctgctcctgttcggctacgaagccactctgggactgagcagcacggaggacgaaggtgaggacccctggtaccagaaggcctgcaagtgtgattgtcaaggaggcccgaatgcactctggtcagccggcgccacgtccctggattgtatcccagaatgcccataccacaaacctcttggcttcgaatccggagaagtgaccccggaccagatcacttgttccaatccggagcaatatgtcggctggtactccagctggactgccaacaaagctcggctgaatagccaaggcttcggctgcgcttggctttcaaagtttcaagattcgtcccagtggctgcaaatcgacctcaaggagatcaaggtcatctccggcattctgacccagggaagatgcgatatcgacgagtggatgaccaagtactcggttcagtacaggactgatgagcgcctcaattggatctactacaaggaccaaaccggaaacaatcgggtgttctacggaaattccgacaggacttcaacggtccagaacctcttgcggccacctatcatctcgcgctttatccgcctcatcccactcggatggcacgtgagaattgccattagaatggaattgctcgagtgcgtgtcgaaatgtgcg

SEQ ID NO: 251013 - DNA, 672 bp, synthetic construct
  misc_feature 1..672: note = Description of Artificial Sequence: Synthetic coding sequence
  source 1..672: mol_type = other DNA
atgtcaagaaagattgaaggcttcctccttctcctcctatttggatatgaagcaacattagggctgtcatctactgaggacgagggggaagatccatggtatcaaaaggcttgcaaatgcgattgccagggaggacccaatgctctatggtccgctggtgctacatcactggattgtatacctgaatgtccttatcataaacctctgggttttgagtctggagaagttaccccagaccagattacctgcagcaacccggagcagtatgtcggttggtactcttcttggactgccaataaggcccgacttaattcacaaggattcgggtgcgcatggctttctaaattccaagacagcagccaatggttgcaaatcgatcttaaggaaataaaagttattagtggaatattaactcaaggtagatgtgacattgatgaatggatgaccaaatattccgtccagtacaggaccgatgaacgattgaactggatctactacaaggatcaaaccggtaacaatagagttttttacggtaatagtgatcgcacaagtacggtacaaaatctacttaggcctccgattatttcaaggttcattcgactcatccctcttggatggcatgttaggatcgctatcagaatggagcttttggagtgcgtttctaagtgcgct

SEQ ID NO: 251014 - DNA, 672 bp, synthetic construct
  misc_feature 1..672: note = Description of Artificial Sequence: Synthetic coding sequence
  source 1..672: mol_type = other DNA
atgtcgcgaaaaatagaaggttttctactattattactatttggttatgaagcgacgttaggtctatcgtcgacggaagatgaaggtgaagatccgtggtatcaaaaagcgtgtaaatgtgattgtcaaggtggtccgaatgcgttatggtcggcgggtgcgacgtcgttagattgtataccggaatgtccgtatcataaaccgctaggttttgaatcgggtgaagttacgccggatcaaataacgtgttcgaatccggaacaatatgttggttggtattcgtcgtggacggcgaataaagcgcgtttaaattcgcaaggttttggttgtgcgtggctatcgaaatttcaagattcgtcgcaatggttacaaatagatctaaaagaaataaaagtaatatcgggtatactaacgcaaggtcgatgtgatatagatgaatggatgacgaaatattcggtacaatatcgtacggatgaacgtttaaattggatatattataaagatcaaacgggtaataatcgagtattttatggtaattcggatcgaacgtcgacggtacaaaatctactacgtccgccgataatatcgcgatttatacgattaataccgctaggttggcatgttcgtatagcgatacgaatggaactattagaatgtgtatcgaaatgtgcg

SEQ ID NO: 251015 - DNA, 672 bp, synthetic construct
  misc_feature 1..672: note = Description of Artificial Sequence: Synthetic coding sequence
  source 1..672: mol_type = other DNA
atgtctaggaagatcgagggtttcttgctcctcctcttatttggctatgaggcaactttgggtttgtcatcaactgaggatgaaggggaggatccttggtatcagaaggcctgcaagtgcgactgccagggaggaccaaatgctctgtggtctgccggtgccacttcactggattgcatcccagaatgtccttatcacaaaccattggggtttgagtccggcgaggtcacaccggaccagattacatgctcgaacccagagcagtacgtaggctggtacagcagctggacagcaaacaaagctcgtctcaactctcaaggtttcgggtgcgcttggctgtccaagttccaggacagctctcagtggctacagattgacctcaaagagattaaggtcattagcgggatcttaacccagggacgctgcgatatagatgaatggatgacgaaatatagtgtgcagtaccgcaccgacgagagattgaactggatatactataaggaccagactggtaataaccgggtgttttatggaaactcggatcgtacgtctacagtgcagaacctgctacgcccccctattatatctaggttcatccgactgatcccattgggttggcacgttaggattgcaatccggatggagctgttggagtgcgtcagcaaatgtgct

SEQ ID NO: 251016 - DNA, 672 bp, synthetic construct
  misc_feature 1..672: note = Description of Artificial Sequence: Synthetic coding sequence
  source 1..672: mol_type = other DNA
atgtcacggaaaattgagggattcctgctgcttcttctcttcggatacgaggcgaccctgggattgtcatcgacggaagatgagggagaagatccctggtaccagaaggcgtgtaaatgtgattgtcaaggtggtccgaacgctctttggtcggccggcgcaacctccctggattgcatccctgaatgtccatatcataagccactgggcttcgaaagtggtgaagtcacccctgatcagattacttgttccaatccagagcagtatgtcggttggtacagctcctggaccgcaaacaaggccaggctcaactcccagggatttggatgcgcatggctttccaagttccaggattcgtcgcaatggctgcagattgacctgaaggagattaaggtgatatccgggatactcacccagggtcggtgtgacattgacgagtggatgacgaagtacagcgtgcagtacagaaccgacgaacgcttgaactggatctattacaaagatcaaacgggtaacaatcgcgtcttttacggaaacagcgatagaacctcaaccgtccagaacctgctcagaccgccaattatctcacgttttatcaggttgattcctctgggctggcatgtcaggattgcaataaggatggaacttcttgaatgcgtgtcgaagtgtgca

SEQ ID NO: 251017 - DNA, 672 bp, synthetic construct
  misc_feature 1..672: note = Description of Artificial Sequence: Synthetic coding sequence
  source 1..672: mol_type = other DNA
atgagccgtaagatagagggatttctgctcctgctactgtttggctacgaggctacattgggactctcctcaaccgaggatgagggggaggatccatggtaccagaaagcatgtaagtgcgattgccagggaggtccgaacgccctatggtccgcgggcgcaacatcactcgactgtataccagagtgtccttatcataagccccttgggtttgaaagcggagaggtgacccccgaccagattacctgtagcaaccccgaacagtacgtgggctggtacagctcatggactgctaataaagctcgcctcaattcacaggggttcggttgtgcttggcttagcaagtttcaggattcctcccaatggctgcagatagatcttaaggagataaaggtcattagtggtattctaacccaaggtagatgcgatatcgacgaatggatgacgaaatattcagtccaatatagaaccgacgagcgactgaactggatttattataaggaccagacgggtaacaatagggtattctacggcaactccgacagaactagtaccgtgcagaacctcctcagaccccccattattagtcggttcatccggttgatcccactgggatggcatgtccggatcgccatccgtatggaactgctcgagtgcgtcagcaaatgtgca

SEQ ID NO: 251018 - DNA, 672 bp, synthetic construct
  misc_feature 1..672: note = Description of Artificial Sequence: Synthetic coding sequence
  source 1..672: mol_type = other DNA
atgtcacgcaaaattgagggtttcttgctcctcctgctgttcgggtacgaagcaacccttggactgagctctactgaagatgaaggggaggacccctggtaccagaaggcgtgcaagtgcgactgccagggcggaccaaacgccctttggagcgcaggagctacctccctggactgtatcccagagtgcccgtaccataagccattgggcttcgagtctggcgaggtgaccccggaccaaattacttgttccaatccagaacagtacgttgggtggtattcatcgtggaccgccaataaagcccgcttgaactcgcaaggattcggatgtgcctggctgagcaaatttcaggatagcagccagtggctgcagatcgatctcaaagagattaaggtgatctcagggattcttactcaaggtcgctgcgacattgacgagtggatgaccaagtactccgtgcagtaccggaccgacgaacgcctgaattggatctactacaaggatcagactgggaacaaccgggttttctacggaaactcggatagaacttcaaccgtccaaaacctccttcgccccccaatcatcagccgcttcatccgactgatccctctgggatggcacgtcaggatagctatcaggatggaacttctggaatgtgtgtccaagtgcgca

SEQ ID NO: 251019 - DNA, 672 bp, synthetic construct
  misc_feature 1..672: note = Description of Artificial Sequence: Synthetic coding sequence
  source 1..672: mol_type = other DNA
atgtcgcggaagattgaggggttcttgctccttcttcttttcgggtacgaagcaacccttggtctttcctccactgaggatgaaggagaggatccatggtatcaaaaggcctgtaagtgcgactgccaaggtggtccaaatgcgctttggtcagcaggtgcaactagccttgactgtattcccgaatgtccataccataaacctctgggatttgaaagcggagaagtcaccccagatcagatcacctgtagcaaccctgaacaatacgtgggatggtacagcagctggactgccaacaaggcacgcctgaactcgcaaggttttggctgtgcctggctctcgaagttccaggactcgtctcaatggctgcagatcgacctgaaggaaatcaaggtcatctcgggcattctgacccagggaagatgtgatattgatgaatggatgactaaatactcagtgcaataccgtaccgatgagagattgaattggatatactacaaggaccagactggaaacaatagggtgttctacggcaattccgacagaacttcgactgtgcagaaccttcttcggccacccatcatctcgaggtttattcgactgataccactcggttggcatgtgcgaattgcaattagaatggaactgcttgagtgcgtgtctaagtgtgct

SEQ ID NO: 251020 - DNA, 672 bp, synthetic construct
  misc_feature 1..672: note = Description of Artificial Sequence: Synthetic coding sequence
  source 1..672: mol_type = other DNA
atgagccgcaagattgagggattcctgcttctccttctctttgggtacgaagcaaccctgggactgagctcgacggaggacgaaggcgaagatccttggtaccagaaggcatgtaagtgcgattgtcagggagggcccaacgcactctggtccgcaggggcaactagcctggattgtatcccagaatgcccttaccataagccccttgggtttgaatcaggtgaagtgaccccagatcaaatcacttgttcaaaccctgagcaatacgtcggttggtacagctcctggactgcgaataaggctagactgaactcacagggattcggttgtgcctggctgtccaaattccaggattcgtctcaatggcttcagatagatcttaaggaaatcaaggtgatctccggaattctcactcagggccgttgcgacatcgacgagtggatgactaagtactccgtccagtatcggactgacgaaaggctgaattggatctactataaggatcagaccggcaataacagggtgttctacggtaactccgatcggacctcaacggtgcaaaatctgcttagaccgcccattatctcgaggttcattagactcatcccactgggctggcatgtgcgtattgcaattcgaatggagcttctggaatgtgtgtcgaagtgcgca

SEQ ID NO: 251021 - DNA, 672 bp, synthetic construct
  misc_feature 1..672: note = Description of Artificial Sequence: Synthetic coding sequence
  source 1..672: mol_type = other DNA
atgtcccgaaagatagaaggcttcctcctattgctattatttggctatgaggctacactgggcctctcctccactgaggatgaaggtgaggatccgtggtatcagaaggcatgcaagtgcgattgccaaggaggaccgaatgccctctggagtgccggagctacgtcgttggattgcatacccgagtgcccctaccataagcccctaggtttcgaaagtggcgaggtgacacccgatcagattacatgctccaaccctgaacagtacgtgggctggtattcgagctggaccgccaacaaagcgcgtttaaattcccaagggtttggctgcgcatggctcagcaagtttcaagattccagtcagtggttgcaaattgatctgaaagagataaaggtgatctccggcatcctgacacagggccgttgcgacatagatgaatggatgacgaagtactccgtacagtacaggaccgatgagcgtcttaactggatatactacaaagatcagaccgggaacaaccgcgtgttttacggaaattccgataggacgtcgactgtgcagaacctactccgccctcccattataagccgctttatccggctgattcctttgggctggcacgtgcgaattgctatacgaatggagctgctagaatgtgtcagtaagtgcgct

SEQ ID NO: 251022 - DNA, 672 bp, synthetic construct
  misc_feature 1..672: note = Description of Artificial Sequence: Synthetic coding sequence
  source 1..672: mol_type = other DNA
atgtcaagaaagatcgagggcttcctgttgctgctgctctttggatacgaggccaccctgggactgtcgtcaacggaggatgaaggggaggatccatggtaccagaaggcgtgtaaatgcgactgtcaaggtggacctaacgccctttggtccgcaggggcaacttcacttgattgcatcccagagtgcccctaccataagccgctgggatttgagtctggcgaagtgacgccggaccaaattacctgcagtaacccagagcaatacgtcggctggtactcctcgtggaccgccaacaaagctcgtctcaattcgcagggattcgggtgcgcttggctctcgaagttccaggactcgtcgcagtggctgcaaatagatctgaaggaaatcaaggtgatttctggtatcctgactcagggacggtgcgatatcgacgaatggatgactaaatacagcgtgcagtacaggactgacgaacggcttaattggatttactataaggaccagaccggcaacaaccgcgtgttctacgggaatagcgaccggacttccaccgtccaaaacctcttgcgaccgcccataatctcacgtttcatccggttgattcctctgggctggcacgtgaggatcgcgattcgcatggaacttctggaatgtgtctccaagtgcgcc

SEQ ID NO: 251023 - DNA, 672 bp, synthetic construct
  misc_feature 1..672: note = Description of Artificial Sequence: Synthetic coding sequence
  source 1..672: mol_type = other DNA
atgtccaggaaaattgaaggttttctgcttctgttgctttttggttacgaagctaccctcggcctttcgtcaaccgaggatgagggagaagatccgtggtaccaaaaggcctgcaagtgtgattgtcagggaggcccgaacgctctctggagcgcgggtgcaacttcccttgattgtattccagagtgtccttaccataagccactgggttttgaatcaggggaagtgactcccgatcaaatcacttgttcgaaccctgaacaatatgtgggctggtactcctcgtggaccgcaaataaggcacgcctcaactcgcagggttttggctgtgcgtggctgtccaaatttcaagactcttcccaatggctgcaaattgatctgaaggagattaaggtgatctcaggaattttgactcagggtcggtgtgatattgatgagtggatgaccaaatactcggtgcagtataggacggatgaacgtttgaactggatctactataaggaccaaactgggaataaccgcgtcttttacggaaacagcgatcgtacttcgaccgtgcagaaccttcttcgcccacccattatcagccggtttatccggctgattccactcggttggcatgtccgaatagccattaggatggaactgctggaatgcgtctcgaaatgtgca

SEQ ID NO: 251024 - DNA, 672 bp, synthetic construct
  misc_feature 1..672: note = Description of Artificial Sequence: Synthetic coding sequence
  source 1..672: mol_type = other DNA
atgtccagaaagatcgaggggttccttcttctgctgcttttcggctacgaggccaccctcggtttatccagtacagaagatgaaggggaagacccttggtatcaaaaagcatgtaagtgcgattgccaagggggacctaatgctctgtggtctgctggagcaacgtctctggactgtattccggagtgcccataccacaagcctttgggtttcgaaagcggagaggtcactccagaccagataacttgtagcaatcccgaacaatatgtaggttggtacagctcttggaccgccaataaagcccgcctgaactcccaaggatttgggtgtgcatggctgtccaaattccaggattcttcccagtggttacagatcgatcttaaagaaatcaaagtaatttcaggcatcctcacccaaggccgttgcgatatcgatgagtggatgaccaagtactctgtgcagtaccgcaccgacgaacgcctaaattggatctactataaggaccagaccggcaataatcgcgttttttatgggaattctgacaggacctccacagtccagaaccttcttaggccccctatcatatctcgtttcatacgcttaatacccctcggctggcatgtcaggattgctatccggatggagctgctcgagtgcgtgtcgaagtgtgca

SEQ ID NO: 251025 - DNA, 672 bp, synthetic construct
  misc_feature 1..672: note = Description of Artificial Sequence: Synthetic coding sequence
  source 1..672: mol_type = other DNA
atgtctcgcaagatcgaggggttccttctgctgttgctcttcggctatgaggctacactcggacttagttctacggaagatgagggtgaggatccctggtatcaaaaggcttgtaagtgtgactgccaaggcggtcctaacgctttgtggtcggctggtgctacaagccttgactgtatccctgaatgcccctaccacaagcccttgggttttgaaagcggcgaggtaacgccagatcagatcacgtgctccaaccctgagcaatacgtggggtggtactcatcctggacggcaaataaagctcgactcaattcacagggattcggttgtgcatggttaagtaagtttcaggactcctcccagtggctgcagattgatttgaaggagatcaaagtgatcagcggaatcttaacacaaggacgatgcgatattgacgaatggatgaccaagtatagtgttcagtatcggaccgatgaacggcttaactggatctattataaggatcagaccggcaataacagagtgttctacgggaatagtgataggacaagcaccgtccaaaatctgttgcggcccccgattatcagtaggtttatcaggctgataccactaggatggcacgttcgaattgccatccgaatggagcttttggaatgcgtcagtaaatgcgcc

SEQ ID NO: 251026 - DNA, 672 bp, synthetic construct
  misc_feature 1..672: note = Description of Artificial Sequence: Synthetic coding sequence
  source 1..672: mol_type = other DNA
atgtcgaggaaaatcgagggatttttactgctgttgctctttggctacgaggccacgctcgggctctcctctacagaggatgaaggtgaggatccctggtatcagaaggcgtgtaagtgtgattgtcagggcggcccaaacgctctctggtccgcaggcgccacttctctcgactgcatacctgagtgtccatatcacaaacccctgggctttgagagtggcgaggtgacccctgaccaaatcacctgcagcaaccccgagcagtacgttggctggtactcctcctggaccgctaataaagcccgcctcaactcacaggggttcgggtgtgcttggctctccaagttccaggattcgtcccaatggctgcaaatcgaccttaaggagatcaaggtaatctctgggatacttacccagggccgatgtgatatcgacgagtggatgactaagtactccgtgcaatataggacagacgagcgattgaattggatctattacaaggatcagaccggtaacaaccgagtattctacggaaatagtgatcgcacgtccactgtgcaaaacttgctcaggcctcccattatctcccgctttatacgtttaatacctctagggtggcacgtgcggattgccattcgaatggagctgttggaatgcgtgagtaagtgtgcg

SEQ ID NO: 251027 - DNA, 672 bp, synthetic construct
  misc_feature 1..672: note = Description of Artificial Sequence: Synthetic coding sequence
  source 1..672: mol_type = other DNA
atgtcacgcaagattgaaggatttctactactcttgctcttcggatacgaggcgacgctgggcttgtcatctaccgaagatgagggagaggatccttggtatcagaaggcgtgtaaatgcgattgccagggaggcccaaatgccctgtggtccgcgggagccacctctttagattgcatcccggagtgcccatatcacaagccattggggttcgagagcggggaggtaacccccgatcagatcacatgctccaacccagagcagtacgttgggtggtacagctcttggaccgccaataaagcccgcctgaactcacagggtttcggctgcgcgtggctgagtaaattccaggacagtagccagtggctccaaattgacctgaaggaaattaaggtcatctctggaatcttaacccagggaagatgcgacatcgacgaatggatgactaaatattccgtgcagtacaggaccgatgagaggctgaattggatttactacaaggatcagaccggcaacaacagggtgttctacggtaactctgatagaactagcacagtgcagaacctgttgcggcccccaataatttcgagatttatcaggctcatacccctcgggtggcatgtgcgtatcgcaattagaatggagctcctggagtgtgtttctaagtgcgca

SEQ ID NO: 251028 - DNA, 672 bp, synthetic construct
  misc_feature 1..672: note = Description of Artificial Sequence: Synthetic coding sequence
  source 1..672: mol_type = other DNA
atgtcccggaagatcgaaggatttcttcttctcctgctcttcggctacgaagctactctgggattgtcctccaccgaggatgagggggaagatccctggtaccagaaagcgtgtaagtgtgactgccagggagggccgaacgcactgtggagcgccggagcaacgtcgttggactgtatcccggagtgcccgtaccataaacctctcggctttgagagcggagaggtgactccggatcaaatcacctgttcgaacccggaacaatacgtcggatggtactcaagctggactgcaaataaggcgcgcctgaactcccaaggtttcggctgtgcctggttgtcaaagttccaagattcgtcccagtggctgcagatcgatctcaaggagatcaaagtcatctcaggaatcctcactcagggacggtgcgacatagacgaatggatgactaaatactcagtccagtatagaacggacgagcggctcaactggatctactacaaggaccagaccggaaacaatcgggtcttttacgggaatagcgatcggacttcaactgtccagaacctgctccggcctcctatcatttcccgcttcatccgcctcatcccactcggatggcacgtgcgcattgctatccgcatggaactgctggaatgcgtcagcaagtgtgcg

SEQ ID NO: 251029 - DNA, 672 bp, synthetic construct
  misc_feature 1..672: note = Description of Artificial Sequence: Synthetic coding sequence
  source 1..672: mol_type = other DNA
atgtctcggaagatcgagggattcctgctgctgctgctgttcggttacgaagctacactgggactttcatcaacggaggacgaaggagaagacccctggtatcagaaggcctgtaagtgcgattgtcagggaggtccaaatgccctctggagtgccggggctactagcctggactgtattcctgagtgcccgtatcataagccgctgggcttcgagagcggtgaggtgacaccggaccagataacctgtagcaatcccgaacagtatgtgggatggtatagttcctggaccgcgaataaagcgaggctgaatagccagggcttcggttgcgcatggttgtccaaattccaggactcatcacagtggctgcagatagatctgaaagagatcaaagtaattagcggcatcctcacccaaggtcgttgtgatatcgatgagtggatgacaaagtatagcgtgcaatatcgaaccgacgagaggctcaactggatctactacaaggaccagacgggcaacaaccgggtcttctatgggaacagtgaccggacgtcaacagtccaaaacctgctcagaccgccaataatatctaggtttattaggctgatccccctcggatggcacgtgagaatcgcgatcaggatggaacttctggagtgtgtctctaagtgcgcc

SEQ ID NO: 251030 - DNA, 672 bp, synthetic construct
  misc_feature 1..672: note = Description of Artificial Sequence: Synthetic coding sequence
  source 1..672: mol_type = other DNA
atgtctcgtaagattgagggcttccttcttctgctcctttttggctatgaagctacactcggactgagttccacggaggatgaaggagaggatccctggtatcagaaggcatgtaagtgtgactgccagggcgggcccaatgcactgtggtccgcaggagctacctcactagactgcattccagagtgtccttaccacaaacccttgggttttgagtctggcgaagtaacccccgaccagatcacatgttcgaatccggagcagtatgtcggttggtactcttcctggaccgccaacaaggcacggctgaatagtcagggcttcggttgtgcttggctctccaaatttcaggactcatcacaatggctacaaattgatctcaaggaaatcaaggttataagcggaattctcacccagggtagatgcgacattgacgagtggatgacaaagtattccgtgcaatatcggacagacgagcgcttgaattggatctattacaaggatcagaccgggaataaccgggtcttctatggcaatagcgatcgaaccagcacagtacagaaccttctccggccccctattatcagcagattcattagactgatccccctgggctggcacgtgcgtattgcaatccggatggaactgctagaatgcgtctcgaaatgcgca

SEQ ID NO: 251031 - DNA, 672 bp, synthetic construct
  misc_feature 1..672: note = Description of Artificial Sequence: Synthetic coding sequence
  source 1..672: mol_type = other DNA
atgtcaaggaaaatagaggggtttctcctcctgctcctgttcggatacgaagcaacccttggactttcctccaccgaggacgagggagaggatccatggtaccagaaggcatgtaagtgtgattgccaaggcgggcctaacgcgctttggagcgccggagcgacctcgctcgactgtattcctgaatgtccataccataagccccttggatttgagtcaggggaagtgacccctgatcagattacctgtagcaaccctgaacaatacgtgggttggtacagctcttggactgcaaacaaagcccggctgaactcacaggggtttggatgtgcctggctctcgaaattccaagattcaagccaatggctgcaaattgatcttaaggagattaaggtgatctccggtatccttacccaagggcgttgtgacattgatgaatggatgaccaagtactccgtccaatatcgcacggatgaacggctcaattggatctactacaaggatcaaaccggaaacaacagagtgttctacggcaattcggatcgcacctcgactgtgcaaaatcttcttcggccccccataatctcgaggtttattcgcctgattcctctgggatggcacgtgcggattgcgatcaggatggagctgctcgaatgtgtgagcaagtgtgcc

SEQ ID NO: 251032 - DNA, 672 bp, synthetic construct
  misc_feature 1..672: note = Description of Artificial Sequence: Synthetic coding sequence
  source 1..672: mol_type = other DNA
atgtccaggaagattgaggggttcctcttactgctgttgttcggctacgaggccacactgggactttcctctactgaggatgagggggaagacccctggtatcagaaagcctgtaagtgtgattgtcagggtggccctaacgccttatggtccgccggggccacatccttggactgcatccccgagtgcccctaccacaagccgctgggatttgagagtggagaagtcacgcctgatcagattacatgctctaatccagagcagtacgtaggctggtactctagctggacggcaaacaaggctcggctgaactcccagggtttcggttgcgcttggttgtctaagttccaggattcttcccagtggctgcagattgatttgaaagagatcaaagtaatttccggcatcctcactcaaggccggtgcgacatcgatgaatggatgaccaagtatagtgtacaataccgtaccgacgaaaggctgaattggatttattacaaagaccagactggcaataacagagttttctatggcaacagcgataggacaagtacggttcaaaaccttctgaggccacccattatatcaagattcatcagattgataccgctagggtggcacgtccgtattgcaatcagaatggagctcctcgaatgcgtcagcaagtgtgcg

SEQ ID NO: 251033 - DNA, 672 bp, synthetic construct
  misc_feature 1..672: note = Description of Artificial Sequence: Synthetic coding sequence
  source 1..672: mol_type = other DNA
atgagccgcaaaattgagggcttcttgttgctgctgctatttggctacgaggctactctgggtctgtcgtcgaccgaggatgagggagaggatccctggtatcagaaggcctgcaagtgtgactgccagggtggccctaacgccctatggtcggcgggcgccacctcactggactgcatccccgagtgtccttaccacaagcccctagggttcgagtctggcgaggtaaccccggaccaaatcacctgctctaaccccgagcagtacgtgggttggtacagctcgtggacggccaacaaggcccgtcttaattcccaggggttcggctgcgcgtggctgtccaaattccaagattcctcgcaatggctgcagattgatctgaaggagattaaggtcatttctggcatcttgacccagggccgctgtgatattgatgaatggatgaccaagtactccgtccaataccggactgatgaacgcctgaactggatttactacaaggatcagactggtaataaccgtgtgttttacggcaactcagaccgtacctctaccgtccagaatctcctccgcccccccatcatatcccggttcattcgccttatccctctcggttggcacgtacggatcgctatccggatggagctcctcgaatgcgtaagcaaatgtgca

SEQ ID NO: 251034 - DNA, 672 bp, synthetic construct
  misc_feature 1..672: note = Description of Artificial Sequence: Synthetic coding sequence
  source 1..672: mol_type = other DNA
atgtccagaaagattgaaggcttcctgctccttctgttgttcggttacgaggcgactctcggcctgagctcgaccgaggacgaaggagaggatccgtggtaccaaaaggcatgcaagtgcgattgccagggcggtccgaatgccctctggtcggccggggcgacttcgctcgattgcatccctgaatgcccgtatcacaagcccttgggatttgagagcggcgaggtgacccccgatcaaatcacttgcagcaatccggaacagtacgtgggctggtactcttcatggactgcaaacaaagctcggctgaatagccagggattcgggtgcgcctggctgtccaagttccaggactcgtcacagtggctgcaaatcgacctgaaggagattaaggtgatctccggaatcctgactcagggacgctgcgacattgatgagtggatgactaagtactcagtccagtaccgcacggacgaaagactgaactggatctactacaaggaccagaccgggaacaatagagtcttttacggtaactcagaccgcacgagcaccgtccagaacctgctgcgcccaccaatcatctcccgattcataagactcatcccactcgggtggcacgtgcggatcgcaatccgcatggagctgctggagtgcgtgtcgaagtgcgca

SEQ ID NO: 251035 - DNA, 672 bp, synthetic construct
  misc_feature 1..672: note = Description of Artificial Sequence: Synthetic coding sequence
  source 1..672: mol_type = other DNA
atgagtcggaaaatcgagggctttctgctgcttcttctgttcggctacgaagctacacttggcctgagctctacagaagatgagggcgaggatccatggtaccagaaggcatgcaaatgcgattgccaaggtggaccaaacgcactgtggtcagcgggagcaacttcccttgactgcattcccgaatgtccataccataaaccacttggattcgagtcaggagaagtgactcccgaccagatcacatgtagtaatccagaacaatacgtgggctggtattcttcatggaccgccaataaagcaagactcaatagccaaggatttggatgcgcttggttatctaagttccaagactcatctcaatggctgcagatcgatctcaaagaaatcaaagtgatatcaggcatcctgacccaaggaaggtgcgatatcgacgaatggatgacaaagtacagcgtgcagtaccggaccgatgagagactcaattggatctattacaaggaccagaccgggaataatcgagttttctacggcaacagcgataggacaagcacagtgcagaacctcctccgccctccaatcatttccaggttcataagactcattcccttgggctggcatgtcagaatcgcaatacgaatggagctcctggaatgtgtctccaaatgtgct

SEQ ID NO: 251036 - DNA, 672 bp, synthetic construct
  misc_feature 1..672: note = Description of Artificial Sequence: Synthetic coding sequence
  source 1..672: mol_type = other DNA
atgagccgcaagattgagggattcctcttgttgctgctgtttggttacgaggccactctggggctgtcgtcaactgaagatgagggtgaggacccgtggtaccaaaaggcgtgcaagtgcgattgccagggaggcccaaacgccctctggtccgcgggtgccacctcgctggactgtatacctgaatgtccttatcataaaccactgggcttcgaaagcggagaggtcaccccagaccaaatcacctgttcgaaccctgaacagtatgtcgggtggtacagttcgtggactgcgaacaaggcaaggctgaactcacagggatttggctgcgcttggctgtcgaaattccaagattcatcgcagtggttgcaaatagacttgaaagaaatcaaggtgatctccggaatcctcacgcaggggagatgcgatatcgacgaatggatgactaagtactcagtgcagtaccggactgacgaacgcctgaattggatctactacaaagaccagacgggaaacaatcgagtgttctacggtaattccgaccggactagcaccgttcaaaatcttctgcgcccaccgatcattagcagattcatccgtttgatcccgctgggatggcacgtgagaatcgccattcggatggaacttcttgagtgcgtgtccaagtgcgct

SEQ ID NO: 251037 - DNA, 672 bp, synthetic construct
  misc_feature 1..672: note = Description of Artificial Sequence: Synthetic coding sequence
  source 1..672: mol_type = other DNA
atgtcaagaaaaatcgagggatttctgctcctgttgctgttcggctacgaggctactctcggcctctcttccactgaggatgaaggggaggatccctggtaccagaaggcttgcaaatgtgactgccagggcgggccgaatgcactgtggagcgcaggcgctacatcccttgactgcatcccagagtgcccatatcataagcccttgggttttgaaagcggagaggtcactcccgaccagatcacctgtagtaacccggagcaatacgtcgggtggtactcatcttggacagcaaataaagcaaggcttaacagccaaggcttcggctgcgcatggttgagcaagtttcaggattccagccagtggctgcaaatcgatcttaaagaaataaaagtgatctccgggattctgacgcagggtagatgcgacatagacgaatggatgaccaaatattccgtccaataccggacagatgagcggctgaactggatctattacaaagaccaaacaggaaataatcgagtattctatgggaactctgatcgcacctcaacagtccagaacctgcttcgccctcctatcatctcacgctttatcagattgatcccccttgggtggcacgtgcgcattgcaattagaatggagcttctggaatgtgtctcaaagtgtgca

SEQ ID NO: 251038 - DNA, 672 bp, synthetic construct
  misc_feature 1..672: note = Description of Artificial Sequence: Synthetic coding sequence
  source 1..672: mol_type = other DNA
atgtcccgcaagatcgaagggtttctgctattgctcctcttcggatatgaggcaacgttaggccttagctccacagaagacgaaggggaagatccctggtaccaaaaggcttgtaaatgcgactgtcagggtgggcctaacgccctctggagtgccggggccacgagcctggactgtatacctgagtgcccctatcacaaaccactgggcttcgagagcggggaggtcacccctgatcagatcacctgtagcaatcctgaacagtacgtggggtggtactccagttggactgctaacaaggctaggctcaactcacagggattcgggtgcgcatggctgtctaagtttcaggattcttcgcagtggttgcagattgatcttaaagagattaaagtcataagtggcatattgacccagggtagatgcgacatagatgaatggatgactaagtacagcgtgcaataccggactgacgagcgcctcaactggatttactataaggatcagacaggaaataatcgagtgttctatggcaattctgaccgtacgagtacagtgcaaaatctgctgaggcctccgattatctctcggtttatcagactgattccgctgggctggcacgtccggattgccattcggatggagctactggagtgtgtgtcaaaatgtgct

SEQ ID NO: 251039 - DNA, 672 bp, synthetic construct
  misc_feature 1..672: note = Description of Artificial Sequence: Synthetic coding sequence
  source 1..672: mol_type = other DNA
atgagccgcaagatcgagggttttctcctactcctcctgtttgggtatgaagcaacactgggcctctcaagcacagaagatgagggagaagacccctggtaccagaaagcgtgcaagtgcgactgtcagggcgggccaaacgcgctgtggagcgctggcgctactagcctcgactgtatcccagagtgtccctaccacaaacctctcggctttgagtcgggcgaggtaaccccagaccagattacatgctcgaatcccgagcagtacgtgggctggtactctagctggaccgcaaacaaggccagattgaactcccagggctttggatgcgcgtggctgtcaaagtttcaggattcctcacaatggctgcaaatagacctgaaggagattaaagtcatttccgggatcctgacacaggggcgatgcgatatcgacgaatggatgacgaagtactccgttcaatatagaaccgatgagcgcctgaattggatttactacaaagatcagaccggcaataaccgcgtattctatggtaatagcgaccgtacctccaccgttcagaatctgctccggccacctattatttcccgattcatcaggctgatccctctgggatggcacgttaggatcgctatcaggatggaactgttagagtgcgtgagcaagtgtgcc

SEQ ID NO: 251040 - DNA, 672 bp, synthetic construct
  misc_feature 1..672: note = Description of Artificial Sequence: Synthetic coding sequence
  source 1..672: mol_type = other DNA
atgtcgcggaagattgaagggtttttgctgcttctgctctttggctatgaagcgacactggggttgagctctacagaggatgaaggcgaggatccatggtaccagaaggcctgcaaatgtgattgccaggggggacctaatgcactctggagtgctggagccacaagcctggattgtattcccgagtgtccctatcataagccactgggatttgaatcaggggaggtgactcctgatcaaatcacgtgcagcaatccagaacaatacgttggctggtacagctcttggaccgccaacaaagcaagactgaactcacaaggattcggttgcgcttggctctctaagtttcaggactcaagccagtggctgcaaatcgatctcaaagagatcaaggtgatatcgggtatcctaacccaggggaggtgcgacatcgacgaatggatgaccaagtactcggtgcagtatagaaccgatgagagacttaattggatctactacaaggatcagaccggcaacaatcgggttttctatggtaatagtgaccgcactagcacggtgcagaatttgttgcgtccgcctattatctcccgcttcatccgactcatcccgctgggatggcatgtccggattgcaatcaggatggagctactggagtgtgtgtcaaaatgtgct

SEQ ID NO: 251041 - DNA, 672 bp, synthetic construct
  misc_feature 1..672: note = Description of Artificial Sequence: Synthetic coding sequence
  source 1..672: mol_type = other DNA
atgtcgcggaagattgaaggatttctcttgcttctgctctttggttatgaagccacgctcggcctgtcctccaccgaagacgagggtgaggatccatggtatcagaaggcttgtaaatgcgactgtcagggtggtcccaacgctctatggtccgcaggcgctacgtccctggactgcattcctgagtgcccatatcacaaaccactgggattcgagagcggcgaagttacacccgatcaaatcacatgctctaatccggagcagtacgtagggtggtattcttcctggactgctaacaaagccaggctgaacagccaaggattcggttgtgcatggttaagcaaatttcaggattctagtcagtggctgcagatcgatttgaaggagattaaggtgatttccggcatcctgacgcaggggaggtgcgatatcgatgaatggatgactaaatattctgtccaatatcgcacggatgagagacttaattggatctattacaaagaccagaccgggaataaccgcgtattttatggcaattctgaccgcaccagcacagtgcaaaatcttctccgaccacccattatcagtaggttcatcaggctgatcccccttggatggcacgtgagaatcgccatccgtatggagttgctggagtgtgtgagcaagtgcgcg

SEQ ID NO: 251042 - DNA, 672 bp, synthetic construct
  misc_feature 1..672: note = Description of Artificial Sequence: Synthetic coding sequence
  source 1..672: mol_type = other DNA
atgtcaaggaaaatcgaagggttcctcttattgctcttgttcgggtatgaagctacactcggactgtccagtactgaagacgaaggagaagatccctggtaccagaaagcctgcaaatgcgactgccagggaggacccaacgcactctggtcagccggggccacaagtctcgattgtatacctgaatgcccctatcataaacctttagggttcgaatctggggaagtgactcccgatcagataacttgctcaaatcctgaacagtacgtcggatggtatagttcttggacagcaaataaagcaagactaaattcacaggggttcgggtgcgcatggctgtctaagtttcaggattccagtcagtggctccagatcgatctcaaagaaataaaagtcatatctggaatactcacacagggacggtgtgatatcgatgaatggatgacaaaatattctgtgcagtataggacagatgaaaggctgaactggatatattacaaagatcagactggaaataaccgggtattttatggaaactctgataggacgagtacggtccagaacctcctacgacctcccatcatatcaagatttattagactgatacccctcgggtggcacgtgaggatagctatcaggatggaattattagaatgcgtgtcaaaatgcgct

SEQ ID NO: 251043 - DNA, 672 bp, synthetic construct
  misc_feature 1..672: note = Description of Artificial Sequence: Synthetic coding sequence
  source 1..672: mol_type = other DNA
atgagccgcaagattgaaggatttctgttgcttctcctgttcggatatgaagcgaccttgggcttgagctccactgaagatgagggcgaggacccttggtaccagaaggcctgcaagtgtgactgccagggaggtccgaatgcgttgtggtctgccggcgcaacctccctcgattgcattccggagtgtccatatcataaacccctgggcttcgaaagcggcgaggtgaccccggaccagatcacttgttccaatcctgaacagtacgtgggctggtacagctcgtggactgccaacaaggcgagattgaattcgcagggattcggatgtgcttggctctccaagttccaggacagctcacaatggctccaaatcgacctcaaggaaatcaaggtgatctcagggattctgacccaggggcgctgcgatatcgatgagtggatgaccaaatactccgtgcagtacagaacggacgagagactcaactggatctactacaaagaccaaaccggaaataaccgcgtgttttatggtaacagcgaccggacctccactgtccaaaatctgctgcgcccaccgatcatctcgagattcattagactgatccctttgggctggcacgtgcggatcgccatccgcatggagctgctcgaatgcgtgtcaaaatgcgcg

SEQ ID NO: 251044 - DNA, 672 bp, synthetic construct
  misc_feature 1..672: note = Description of Artificial Sequence: Synthetic coding sequence
  source 1..672: mol_type = other DNA
atgtcccgaaagatagagggatttcttctgctcctgctgttcggctatgaagccacgttgggtctgagtagcaccgaggacgaaggcgaggacccctggtatcagaaggcatgtaagtgcgactgtcaaggcggaccaaacgcactgtggagtgctggggctactagcctagactgcattcccgaatgcccttatcacaagcctctgggtttcgagagtggagaggtgacccctgaccagattacctgttcaaatccggagcagtacgtggggtggtacagcagctggacagcaaacaaggcgcgattaaattcccagggctttggatgcgcctggctgagtaagttccaagactcttcacaatggttgcagattgatctaaaggagattaaggtaatatcaggaatcctgactcagggcagatgtgatatagatgagtggatgaccaagtactctgtccagtatcgcacggacgagagacttaattggatctattataaggatcagactgggaataatcgggtgttttatggaaacagtgatcgcacatctacggtgcaaaacctcctgcgcccgcccatcataagccgctttatccggctgatcccactgggttggcatgtacgcattgccatccggatggagttgctcgaatgtgtgtctaaatgtgca

SEQ ID NO: 251045 - DNA, 672 bp, synthetic construct
  misc_feature 1..672: note = Description of Artificial Sequence: Synthetic coding sequence
  source 1..672: mol_type = other DNA
atgagcaggaaaattgagggctttttgctccttcttctttttggatacgaggctacccttggactgtcgtctactgaggatgaaggagaggacccctggtatcaaaaagcgtgcaagtgcgactgccaaggaggaccgaatgctctatggagcgctggagccacatctctagattgcattccagaatgcccataccacaaaccacttggctttgaatcgggagaggtcacaccagaccagattacttgttctaatccagaacagtatgttggatggtattctagttggaccgctaacaaggcacgtctgaactcgcaaggattcggatgtgcgtggttgtccaagtttcaggattcgagccaatggctacaaatcgacttaaaagaaatcaaagttatcagtggaattcttacgcaagggaggtgcgatattgacgagtggatgactaagtattcggtacagtaccgaacagacgaaagactcaattggatttactacaaggatcaaactggaaacaatcgtgttttctacggaaattcagaccgtacaagtactgttcaaaatcttcttcgtccacctatcatttccagattcatccgactcattccacttggatggcatgttcgaatcgctataaggatggagcttttggaatgtgtttcaaagtgcgct

SEQ ID NO: 251046 - DNA, 672 bp, synthetic construct
  misc_feature 1..672: note = Description of Artificial Sequence: Synthetic coding sequence
  source 1..672: mol_type = other DNA
atgtccaggaagatagaaggcttcctgctgctgcttctgttcggctatgaagccacattgggactctcaagcaccgaggacgaaggtgaggatccctggtaccagaaagcttgtaaatgtgactgccagggcggcccaaacgccctgtggtcagcaggggcaacctcgcttgattgcatccctgaatgcccttaccacaaaccactagggttcgagtctggtgaagtgaccccagaccagattacctgttctaacccagagcagtatgtggggtggtattccagttggactgccaataaagcccggctgaatagccaggggtttggatgcgcttggttaagcaaattccaagactcaagccagtggctgcaaattgacttaaaggaaattaaggtcatatccggaatcttgacgcaaggcaggtgtgatatcgatgaatggatgacaaaatactctgtgcaatacaggacagatgaacgcttaaactggatctactacaaagatcagaccgggaacaatcgcgtgttctacgggaacagcgatcggacatccaccgttcagaacctcttgaggcctcctatcattagcagatttatcagactgatcccccttgggtggcatgttagaatagccatccgaatggagctgctcgagtgtgtttcgaagtgtgct

SEQ ID NO: 251047 - DNA, 672 bp, synthetic construct
  misc_feature 1..672: note = Description of Artificial Sequence: Synthetic coding sequence
  source 1..672: mol_type = other DNA
atgagtaggaagatagaaggttttctcctcctgttgctgtttggttacgaagctaccctgggactgtcaagcactgaagacgagggtgaggatccatggtaccagaaggcttgtaagtgtgactgtcaaggaggacctaacgccctttggagcgcgggagcgacttctttggattgcatacccgagtgcccataccataaacctctcggtttcgagagcggagaagtgactccagatcagatcacttgctcaaatcccgagcagtacgtcggttggtactcctcttggactgctaacaaggccaggctgaattcacagggcttcggttgcgcctggctgtctaagtttcaggattcttcacaatggctgcagatcgacctgaaggagatcaaagtcatatctggcattctgacccagggaaggtgcgatatcgatgagtggatgacaaaatactccgtgcagtataggacagacgagcgcctcaattggatttactacaaggaccagacaggcaataaccgcgtgttttacggcaatagtgacaggacctctaccgtgcaaaatctgctgcgcccccctatcatctccaggttcatcaggctcatcccactgggatggcacgtgcgcatagctatcaggatggaactgttggagtgtgtcagcaagtgtgcc

SEQ ID NO: 251048 - DNA, 672 bp, synthetic construct
  misc_feature 1..672: note = Description of Artificial Sequence: Synthetic coding sequence
  source 1..672: mol_type = other DNA
atgtcgaggaagatcgagggattcctccttctcctgctgttcggatatgaagcgacgctgggcctgtcgtccactgaggacgaaggcgaggacccctggtaccaaaaggcatgcaagtgcgattgtcagggaggaccgaacgctctgtggtcagccggggccacttccctggactgcattccagaatgcccgtaccacaagccgctcggatttgagtcgggcgaggtgaccccggaccagatcacgtgctccaacccggaacagtacgtcggatggtactcctcatggaccgccaataaggcgcggctcaactcgcaaggcttcgggtgcgcctggttgtcaaagtttcaggactctagccagtggctccaaatcgacttgaaggagattaaagtgattagcggaatccttacccagggcagatgcgatatcgacgaatggatgactaaatactcggtccagtatagaaccgatgaacggctgaattggatctactacaaagatcagacgggaaacaatcgcgtgttctatggcaattcggacaggacctccaccgtccaaaacctgctgaggccaccaatcatctcccggtttatccggctgattccgctcggctggcatgtgaggatcgcaatcagaatggagctgctcgaatgcgtgtccaagtgtgct

SEQ ID NO: 251049 - DNA, 672 bp, synthetic construct; identical to SEQ ID NO: 250993
  misc_feature 1..672: note = Description of Artificial Sequence: Synthetic coding sequence
  source 1..672: mol_type = other DNA

SEQ ID NO: 251050 - DNA, 672 bp, synthetic construct
  misc_feature 1..672: note = Description of Artificial Sequence: Synthetic coding sequence
  source 1..672: mol_type = other DNA
atgtccaggaagattgaaggcttcctgctcctcctgctcttcggatatgaggcgacgctgggcctgtcgtcgaccgaggacgaaggcgaggacccttggtaccaaaaggcttgtaaatgcgactgccagggaggtcccaacgcattgtggagcgctggagccacttccctggattgtattccggaatgtccgtatcacaagccactggggtttgaatccggggaagtgactcctgaccagattacttgctccaatccggaacaatatgtgggatggtactcatcatggaccgctaacaaggccagacttaactcgcaaggttttggatgcgcctggctctcgaaattccaggactccagccagtggctccagattgaccttaaggaaatcaaggtgatttccggaatcctgacccagggccgctgcgacatcgatgagtggatgactaaatactctgtccaataccgcaccgacgagagattgaactggatctactacaaagatcaaactggcaataacagggttttctacggtaattcggacagaacctcaactgtccagaaccttctgcgcccgccgatcatcagccggttcatccggctgattccattggggtggcatgttcgaatcgcgatccggatggaactgctggaatgcgtctctaagtgtgcc

SEQ ID NO: 251051 - DNA, 672 bp, synthetic construct
  misc_feature 1..672: note = Description of Artificial Sequence: Synthetic coding sequence
  source 1..672: mol_type = other DNA
atgtctcggaagattgagggattcctgcttcttctcctctttgggtacgaagcaactctcgggctttcatcgacggaagatgaaggcgaggatccttggtaccaaaaagcatgtaagtgcgactgccaaggtggtcctaatgcgctgtggagcgccggtgcgacttcgctggattgtattcccgagtgtccctaccataagcccctgggatttgaatcaggcgaagtgacccctgaccagataacgtgttcaaacccagaacaatacgtcggatggtactcatcatggaccgccaacaaagcaagattgaacagccagggttttggctgcgcctggctgtctaagttccaggattcctcccaatggttgcaaatcgatctgaaagagataaaggtcatttccgggattctcactcaaggacgctgcgacatcgatgaatggatgaccaagtacagcgtgcaataccggacggacgagcggctgaactggatctattacaaggatcagaccggaaacaacagagtgttttacggaaatagcgaccggacgtcaaccgtgcagaatttgctgaggccacctattatcagcagattcatccgccttatcccacttggatggcacgttagaattgcaattagaatggagctcctggaatgtgtgagcaaatgtgca

SEQ ID NO: 251052 - DNA, 672 bp, synthetic construct
  misc_feature 1..672: note = Description of Artificial Sequence: Synthetic coding sequence
  source 1..672: mol_type = other DNA
atgagccgcaagatcgagggctttctgctgttactgctgttcggctacgaggcaaccctcggactgagctccacagaggacgagggcgaagatccatggtaccaaaaggcttgcaagtgcgattgccagggaggcccaaacgccctctggtcagcaggcgcaacctcactcgactgcatccccgaatgtccctatcataaacctctggggtttgaaagcggagaggtcacaccagatcagatcacttgctctaatcccgaacagtatgtcggctggtacagctcttggaccgccaacaaggccagactaaacagtcagggatttgggtgtgcatggctttcaaaattccaggacagcagccaatggctccaaattgatctgaaagagatcaaggtcatcagtggaattctgacacagggaagatgtgatatcgatgagtggatgaccaaatacagcgtgcaatacagaaccgacgagagacttaactggatctattataaggatcaaacaggtaacaacagggttttttatgggaactctgaccgcactagcacagtgcaaaacctgcttcgcccgccaatcattagccgcttcatcaggctgatcccactcggatggcatgtgcgcatcgctatacgcatggaactcctcgaatgtgtgagcaaatgtgcc

SEQ ID NO: 251053 - DNA, 672 bp, synthetic construct
  misc_feature 1..672: note = Description of Artificial Sequence: Synthetic coding sequence
  source 1..672: mol_type = other DNA
atgtctaggaagattgagggctttctgctattactcctctttggatatgaagcaaccctgggcctctcgagtaccgaagacgaaggggaggatccatggtaccagaaggcctgtaagtgcgactgtcagggcggtcctaatgctctctggagcgcgggggccacttcactcgactgcattccggagtgcccctatcacaagcctctggggtttgagtccggggaagtgaccccagatcaaattacctgttctaacccggagcagtatgtcggctggtactccagctggacagctaataaagctaggctgaactcccaggggtttggatgcgcatggctgtccaagttccaggactcttcgcaatggcttcagatagacttaaaagaaattaaggttatctctgggattctcacccagggccggtgtgatatagatgagtggatgacgaagtattctgtgcagtacaggaccgatgaaaggcttaactggatctattataaagatcaaaccggaaacaatagagtcttttacgggaactccgatcggacttccacagtgcagaaccttctgcggcccccgatcatttcgcgttttattcgtctaattccgctcgggtggcacgtcaggattgccatcagaatggaactgctagaatgtgtttcaaaatgcgca

SEQ ID NO: 251054 - DNA, 672 bp, synthetic construct
  misc_feature 1..672: note = Description of Artificial Sequence: Synthetic coding sequence
  source 1..672: mol_type = other DNA
atgagccgtaagattgaagggttcctgctgctgctactgtttggttatgaggcaactctaggattgtcgagcaccgaggacgagggagaggacccctggtaccagaaagcctgcaagtgcgactgccaaggtggtccaaatgcgctgtggagcgctggagctaccagtctcgactgcattccggagtgtccttatcacaagccattaggcttcgagtccggcgaggtcacgccggaccagatcacttgtagcaaccctgaacaatatgtggggtggtactcaagctggaccgccaacaaggctcgcttgaactcacaaggtttcggctgtgcctggttgagcaaattccaggattcaagccagtggttgcaaatcgatctgaaggagattaaggtgattagcggtatcctgacccagggcagatgtgacatagatgagtggatgacaaaatacagcgtccaatacagaaccgatgaacgcctgaattggatctattataaagaccagactggcaataatcgtgttttctacggcaatagcgatcgcacgtccaccgtacagaacctgttgagaccaccaatcatttctcgttttatccggctgatccctttgggctggcacgtgcgcattgcgattcgcatggaactgctagagtgcgtgagcaaatgcgct

SEQ ID NO: 251055 - DNA, 672 bp, synthetic construct
  misc_feature 1..672: note = Description of Artificial Sequence: Synthetic coding sequence
  source 1..672: mol_type = other DNA
atgtcgcggaaaatagaagggttccttctgttgctcctctttggatacgaagcaaccctgggcctgtcctcgaccgaggacgaaggagaagatccttggtaccagaaggcatgtaagtgtgactgccagggaggcccaaacgccttgtggtcggcaggagcaacttccttggactgtatcccagaatgcccttaccataagcctcttggatttgaatccggggaggtgacgcccgatcaaattacttgtagcaatccagagcaatacgtgggttggtactcctcgtggacggccaacaaggcaagactgaactcgcaaggatttggttgtgcatggttgagcaagtttcaagattcgtcccagtggcttcaaatagacctcaaagagatcaaggtcatctcggggattcttactcagggacggtgtgatattgacgaatggatgactaagtacagcgtgcaataccggaccgatgaaagactgaactggatttactataaggatcagactggtaacaaccgagtgttctacgggaatagcgatcgcacttcgaccgtccaaaatcttcttcgccctcccattatcagcaggttcatccggctgataccgctgggttggcatgtgcgtatcgccattcgcatggagcttctcgagtgtgtcagcaaatgtgcc

SEQ ID NO: 251056 - DNA, 672 bp, synthetic construct
  misc_feature 1..672: note = Description of Artificial Sequence: Synthetic coding sequence
  source 1..672: mol_type = other DNA
atgagccggaaaattgagggcttcctcttattactactattcggctacgaagccacccttgggctttccagcaccgaagatgaaggggaggatccatggtatcagaaggcgtgcaaatgcgattgtcagggtggcccaaatgctctgtggagcgcgggagccacttccctagattgtattccggagtgtccgtaccacaaacccctgggcttcgaaagcggtgaggtgaccccagatcagattacttgtagcaaccctgagcaatatgtcggctggtactccagttggacagccaacaaagctaggcttaacagtcaggggttcggctgcgcctggttatctaagttccaggactcttcccagtggctgcagattgacctgaaagaaatcaaggtcatatcgggcatcttgacacagggaagatgtgacatcgatgagtggatgacaaagtattcagtgcagtaccgcacagacgagcgactgaactggatctactacaaggaccagacggggaacaacagagtgttttacgggaactctgatcgaacgtctacagtgcaaaatttgctccgtccccccatcatctcccggttcatccgacttattccattaggctggcatgtgcggatagcgattcgaatggagctgctggagtgcgtgtctaaatgtgca

SEQ ID NO: 251057 - DNA, 672 bp, synthetic construct
  misc_feature 1..672: note = Description of Artificial Sequence: Synthetic coding sequence
  source 1..672: mol_type = other DNA
atgtcgagaaagattgagggctttctgctgcttctccttttcggatacgaggccactcttggccttagctccacggaggatgaaggggaggacccttggtaccaaaaggcgtgtaagtgtgattgtcaggggggacctaacgccctctggtctgcaggtgcgacctcccttgactgtattccagagtgtccataccacaagcctctgggatttgagagcggtgaagtgactccagatcaaattacttgttccaaccctgaacagtatgtgggttggtactcatcctggaccgcaaataaggcgaggctcaacagccagggatttgggtgtgcatggctgagcaagttccaagactcctcacagtggctccagattgatctgaaggagatcaaagtcatctcaggtattctgactcagggaaggtgcgatattgacgaatggatgactaagtactcggtgcaataccggactgacgaacgcctgaactggatttactacaaggaccagacgggaaacaatcgtgtattctacggaaactccgatcggacctccactgtgcagaatcttcttcgtccccccattatctcacggttcatcagactgattccactgggttggcatgtgcgcattgccatcaggatggagctgctcgaatgtgtctccaaatgcgca

SEQ ID NO: 251058 - DNA, 672 bp, synthetic construct
  misc_feature 1..672: note = Description of Artificial Sequence: Synthetic coding sequence
  source 1..672: mol_type = other DNA
atgagccgaaagattgagggtttcctgcttctcctcctttttggttatgaagcaaccctgggactgtcaagcactgaggatgaaggagaagatccttggtaccaaaaggcatgtaaatgtgattgtcaagggggcccgaatgcactttggtccgcaggagctacctcacttgactgcattcctgagtgtccttaccacaagcctcttggattcgaatctggagaggtgacccctgatcagattacttgtagcaatcctgaacagtacgtggggtggtactcctcgtggaccgccaacaaagcacggctgaatagccaaggatttggttgtgcttggctgtcgaaatttcaggactcctcgcaatggcttcaaatagacctgaaggaaatcaaggtcatctcgggaatcctcacccagggacgttgtgatattgatgagtggatgactaagtactcagtgcagtacagaactgatgagcggcttaactggatatactacaaagaccaaactggcaacaatcgggtgttctacggtaattccgaccggacctcaactgtccaaaacctgcttcgcccaccgattatctcaaggtttattcggctcattccactgggatggcacgtcagaattgccattcgcatggaacttctggaatgcgtgtcgaagtgtgct

SEQ ID NO: 251059 - DNA, 672 bp, synthetic construct
  misc_feature 1..672: note = Description of Artificial Sequence: Synthetic coding sequence
  source 1..672: mol_type = other DNA
atgagccgtaagatcgaaggctttctcctgttgcttcttttcggatacgaggctacgctggggctttcatccacggaagatgagggtgaggacccatggtaccaaaaagcatgtaagtgtgactgtcagggaggacccaatgcactttggtccgccggagcgacctcgcttgactgcattccagaatgcccttaccacaaaccactgggatttgaatctggtgaagtgacccccgatcaaataacttgctccaaccccgaacaatacgttgggtggtatagcagctggactgctaataaggctcggctgaactcgcaaggtttcggatgcgcttggctctcaaagtttcaagatagctcccaatggctgcagatcgaccttaaagaaatcaaggtcatttcgggtatcctcacccagggcagatgtgacattgacgaatggatgaccaagtactccgttcagtatcgcactgatgaacggctgaattggatttactacaaggaccagaccggtaacaacagagtgttttacggaaacagcgatcgtactagcaccgtgcaaaaccttcttcgccctcctatcatttcacgcttcattagacttataccactcggttggcacgtcagaatcgcaattcgcatggaacttctcgaatgcgtgtccaagtgtgca

SEQ ID NO: 251060 - DNA, 672 bp, synthetic construct
  misc_feature 1..672: note = Description of Artificial Sequence: Synthetic coding sequence
  source 1..672: mol_type = other DNA
atgtcccgtaagatcgaagggttcctgctgttgttgctgttcgggtacgaggcgacacttgggctctcatccaccgaagatgaaggcgaagacccctggtaccagaaggcctgcaaatgtgactgtcagggcggccccaatgccctctggagcgccggcgccacctccctggactgcatccccgagtgcccctaccacaagccgctgggctttgagagtggcgaggtaacgccggaccagattacctgctcaaatccggaacagtacgtcggatggtactcctcctggactgccaataaagcacgtctcaatagtcaaggattcgggtgtgcatggttaagcaagttccaagactctagtcagtggctgcaaatagatctcaaggaaataaaagtgatttcgggaatcctaacccaggggcgatgcgacattgacgaatggatgaccaaatatagcgtgcagtaccgcacggatgaacggctgaactggatttactacaaagatcagaccggcaacaatcgcgtgttttatggaaatagtgacagaacaagtaccgttcagaatttgttgcggccaccaataatttcacgctttataagattgatccccctcgggtggcatgtgcggatcgcgatccgcatggagcttctagaatgtgtgagtaagtgtgca

SEQ ID NO: 251061 - DNA, 672 bp, synthetic construct
  misc_feature 1..672: note = Description of Artificial Sequence: Synthetic coding sequence
  source 1..672: mol_type = other DNA
atgtccaggaaaatcgaggggtttcttctcttactcttgtttggatacgaggcaactctgggactctcgagcaccgaggatgagggcgaggatccgtggtaccagaaagcttgtaagtgtgattgtcagggaggacccaacgccctctggagcgcgggtgccacctctctagattgtatcccagaatgtccctatcacaagcctttggggtttgaatctggggaggtgacgccagaccagatcacctgcagtaatccagagcagtacgtgggctggtactcatcgtggactgcgaataaagcccgcctgaatagccagggctttggctgcgcctggctgtccaagtttcaggactctagccagtggctccaaatcgatcttaaggaaatcaaggtgatcagtggcattctgacacaaggacggtgcgatatagacgagtggatgaccaaatatagcgtgcagtacaggaccgatgagcgccttaactggatttactacaaggatcaaacggggaataaccgtgtcttctatggcaacagtgacagaacttccaccgtgcagaacctgttgagacctcctatcattagccggttcattaggcttataccccttgggtggcacgttaggatagccattcgcatggaactactggaatgcgtcagcaagtgcgct

SEQ ID NO: 251062 - DNA, 672 bp, synthetic construct
  misc_feature 1..672: note = Description of Artificial Sequence: Synthetic coding sequence
  source 1..672: mol_type = other DNA
atgtccaggaaaattgaggggtttctgctgctccttttattcggttatgaggcaaccctcggactttcatcgacagaggacgaaggcgaggatccctggtaccagaaagcttgtaaatgtgactgccaggggggcccaaatgccctatggtctgcgggagctaccagtctcgactgcatcccggaatgcccttatcacaagcccctaggctttgaaagcggagaggttacaccggatcagatcacatgctctaacccggagcaatacgtcgggtggtactcctcatggaccgcaaataaggcccggctgaacagtcagggatttgggtgtgcatggctcagcaagttccaagacagctcccaatggctgcagattgatttgaaggagataaaggttatttcaggcattctgacccagggccgatgtgatatagacgaatggatgaccaaatatagtgtgcagtatcgcactgacgaaaggttaaactggatttactataaagatcaaacaggcaacaaccgcgttttctacggcaatagcgacaggacctcaactgtacagaacctgctccgcccaccgatcattagccgctttattagattaatcccattgggctggcacgtgcggatcgcaattcggatggagctactcgagtgcgtttccaagtgcgct

SEQ ID NO: 251063 - DNA, 672 bp, synthetic construct
  misc_feature 1..672: note = Description of Artificial Sequence: Synthetic coding sequence
  source 1..672: mol_type = other DNA
atgagccggaagatcgagggctttctcctgctgctcctatttgggtatgaagctactctgggattaagtagcacagaagatgagggcgaggatccatggtatcagaaagcctgcaagtgcgattgtcagggggggcccaatgcattatggtcagcaggggctaccagtcttgactgtatacctgagtgtccttaccacaagcctcttggatttgagtctggcgaagtcacccctgaccaaattacatgtagcaatccggagcagtatgtggggtggtattcctcctggaccgcaaataaggccaggctaaattcacaaggctttggctgcgcctggttaagcaagttccaggacagctcacaatggctgcaaattgacctcaaagaaatcaaggtgatttctggcatcctgacgcaggggaggtgtgatatcgacgaatggatgaccaagtacagtgtgcagtatcgcaccgacgaaagactgaactggatttactacaaagaccaaactgggaataaccgcgttttttatggaaactcagacaggacatccacagttcagaacctgctcaggccccctattatcagtcgcttcattcgattaattcctcttggatggcacgtgcgaatcgcaatcaggatggaactgcttgagtgtgtgtcgaagtgtgca

SEQ ID NO: 251064 - DNA, 672 bp, synthetic construct
  misc_feature 1..672: note = Description of Artificial Sequence: Synthetic coding sequence
  source 1..672: mol_type = other DNA
atgtccagaaagatcgaaggatttctgctcctcctgctcttcggatacgaggcgaccctcggtctttcgagtaccgaagatgagggagaagatccatggtaccaaaaggcgtgcaaatgtgactgccaaggcggtccaaatgccctgtggtcggcgggggccacttccctcgactgcattccggagtgcccttaccacaaaccgctgggattcgaatcaggagaggtgactcctgaccagatcacctgctccaacccggaacaatatgtgggatggtactcctcatggactgccaacaaggctcggctgaattcacagggatttggatgcgcctggctgtccaagttccaggattcatcccagtggctgcagatcgacttgaaggagatcaaagtgatctccggcatcctgacccagggaaggtgcgatatcgatgaatggatgaccaagtactcggtgcagtaccggactgacgaacgccttaactggatctactacaaggatcagacggggaataaccgcgtgttctacggaaattcagaccggactagcaccgtgcaaaatctgctccgtcccccaattatctcacgcttcattcgccttatcccgttgggttggcacgtgagaatcgcaatccgcatggaactcctcgagtgtgtgtcaaagtgcgct

SEQ ID NO: 251065 - DNA, 672 bp, synthetic construct
  misc_feature 1..672: note = Description of Artificial Sequence: Synthetic coding sequence
  source 1..672: mol_type = other DNA
atgtcgagaaaaattgagggattcctgctgctgttgttgttcggctacgaagcaaccctgggcctctcatcgactgaggacgagggagaggatccttggtaccagaaggcttgcaagtgcgactgccagggagggccaaacgccctttggtcggctggcgccacgtcacttgactgcatcccggaatgcccgtaccacaagccgctgggatttgaaagcggtgaagtgactccggatcaaatcacctgttcgaatccagagcagtacgttggttggtatagcagctggaccgccaataaggcgcggcttaattcccagggcttcggctgtgcctggctctctaagttccaggactcctcccaatggctgcagatcgacctgaaggaaatcaaagtcatatcaggaatcctgactcagggacgctgcgacatcgacgagtggatgactaaatactcggtgcaataccggaccgatgaacgtctgaactggatttactacaaggatcagactggaaacaaccgggtcttttacgggaacagcgatagaacctccaccgtgcaaaacctgctgcgcccccctatcatctcacgcttcatccgcctcatcccactcggatggcatgtgcgaatcgcaattaggatggaactcctcgaatgcgtgtccaagtgtgcg

SEQ ID NO: 251066 - DNA, 672 bp, synthetic construct
  misc_feature 1..672: note = Description of Artificial Sequence: Synthetic coding sequence
  source 1..672: mol_type = other DNA
atgtctcggaagatcgaggggtttcttctcctcttacttttcgggtacgaagctacgctgggccttagcagtacagaggacgaaggggaagacccctggtaccaaaaagcctgcaaatgtgactgccaaggcggtcccaatgctctttggagcgcgggggctacatcactggactgcattcctgaatgcccttatcataagccccttggtttcgaaagtggcgaagtcaccccagatcaaattacatgctcaaatcccgagcagtacgtgggttggtatagtagctggacagccaacaaagcccggctgaatagccaggggttcggttgtgcatggctatccaagtttcaggactccagtcagtggttgcagatcgatttaaaggagattaaggtcatttcgggtatcctaactcagggtaggtgtgacatagacgagtggatgacgaaatatagtgtgcagtatagaactgacgaacgtctcaactggatatattacaaggaccaaaccgggaataaccgagtgttttatggcaactccgaccgtacatctacggtccagaatctcctgcggccaccaatcatctctcgatttattcggttgatccctctgggttggcacgttcgcattgcaatccggatggaactgctggagtgtgtgagtaagtgcgcg

SEQ ID NO: 251067 - DNA, 672 bp, synthetic construct
  misc_feature 1..672: note = Description of Artificial Sequence: Synthetic coding sequence
  source 1..672: mol_type = other DNA
atgtcgcgcaagatcgagggtttcctcctgctcctgctgttcggatacgaggccacgctgggtctgtcctcgaccgaagatgaaggcgaagatccatggtaccaaaaggcctgcaagtgcgattgccagggaggcccaaatgccctgtggagcgccggagccacctcactggattgcatcccggaatgtccttaccacaagccccttggatttgagtccggtgaagtgactccggatcaaatcacgtgctcgaacccagaacagtatgtcggctggtactcgtcatggactgccaacaaggcccgcctgaattcgcagggcttcggctgtgcttggctgagcaaattccaggactcatcgcaatggctccagatcgaccttaaggagattaaagtcatttccggaatcctgacccagggaagatgcgacatcgatgagtggatgactaagtactctgtgcaatatcggaccgacgagcgcctgaactggatctactataaggatcaaaccggcaacaatagagtgttttacggaaactcagaccgcacttctaccgtccagaacctgctgcggccgccgatcatcagcaggtttattcgtctgatcccacttggatggcacgtccgcatcgcgattcggatggaattgctcgaatgcgtctcaaaatgcgcc

SEQ ID NO: 251068 - DNA, 672 bp, synthetic construct
  misc_feature 1..672: note = Description of Artificial Sequence: Synthetic coding sequence
  source 1..672: mol_type = other DNA
atgtcgagaaagatcgagggattcctcctgcttcttctgtttggttacgaagccactcttggactcagctctactgaggatgaaggtgaagatccatggtaccaaaaggcatgtaagtgtgattgtcaaggaggcccaaacgcactttggtcagcaggtgcgacttcattggattgtattccagaatgcccttaccacaagccgctcggattcgagtccggagaggtgaccccagaccaaattacctgctccaatcctgaacagtacgtggggtggtactcgtcttggactgctaacaaggccagacttaactcacaaggttttgggtgcgcctggctgtcgaaatttcaggatagctcgcagtggctgcagattgatcttaaggagattaaggttatttcgggtatcctgactcaaggcagatgtgacattgatgaatggatgaccaagtactcggtgcagtaccgcacggatgaacggctcaactggatttactacaaggatcaaaccggcaacaaccgagtgttctatggaaactccgacagaacctcgacggtgcagaatctgcttaggcctcctataatctcgcggttcatccgactcattcccctcggatggcatgtccgcattgcgattagaatggaacttctggaatgtgtgtcgaagtgcgca

SEQ ID NO: 251069 - DNA, 672 bp, synthetic construct
  misc_feature 1..672: note = Description of Artificial Sequence: Synthetic coding sequence
  source 1..672: mol_type = other DNA
atgtctaggaagatagagggtttccttctgctgctgttgtttggctacgaagccacactgggactcagcagcacagaggatgaaggagaagacccgtggtaccagaaagcgtgcaagtgtgactgccagggcgggccaaacgctctgtggtcagcgggagccacatcactggattgtattcccgaatgtccctaccacaagcctctaggcttcgagagtggagaggttaccccagaccagattacttgttctaatccagagcagtacgtcggttggtactcgtcctggacagctaataaggctcgcctcaattcccagggctttgggtgcgcgtggttgtctaagtttcaggactcatcccagtggctgcagatcgacctcaaggagataaaggttattagtggcattctgacccagggacggtgtgatattgacgagtggatgacgaaatactccgtgcagtatcggacagacgaaaggttgaactggatctactacaaagatcagacaggcaataatcgggttttctacggcaactccgacagaacatctacggtgcagaacctgttgcgcccacctattattagccgcttcatcaggctgattcccctgggctggcatgtgcgcatcgccatcagaatggagctcttggagtgtgtgtcaaagtgtgca

SEQ ID NO: 251070 - DNA, 672 bp, synthetic construct
  misc_feature 1..672: note = Description of Artificial Sequence: Synthetic coding sequence
  source 1..672: mol_type = other DNA
atgtcccgcaaaatcgaaggctttttgctgctgctgctcttcggatacgaggcaaccctgggccttagctcaactgaagatgaaggtgaagatccttggtatcagaaagcctgcaagtgcgattgccaaggcgggccgaacgcactctggtcggccggagccacctccctggactgcatccccgagtgcccttaccacaagccgctgggattcgaatcgggcgaagtgaccccggaccagatcacctgttcgaatccggagcaatacgtgggatggtactcgagctggaccgctaacaaagcccgtcttaattcccagggttttggctgcgcatggctgtcaaagttccaggattcatcccaatggctccagatcgacctgaaggaaatcaaggtgatctcaggaatcctgacccagggcaggtgtgacatcgacgaatggatgactaagtactctgtgcagtacagaactgacgagcgcttgaactggatatactacaaagaccagactggcaacaatagagtgttctacggaaactccgacaggacctcaaccgtgcagaatttgctgcgcccgccaatcatctccagattcattcggctcatccctctggggtggcatgtgagaatcgcaatcagaatggagttgctcgagtgcgtttcgaagtgcgca

SEQ ID NO: 251071 - DNA, 3297 bp, synthetic construct
  misc_feature 1..3297: note = Description of Artificial Sequence: Synthetic coding sequence
  source 1..3297: mol_type = other DNA
atgtcactgaacaactcctctaacgttttcctcgatagcgtaccgtccaacacaaacaggttccaggttagtgtcatcaacgagaatcatgagtctagcgccgcagctgatgacaacacagaccctccacattatgaggagactagtttcggtgatgaggcacagaaacgactgagaatctctttcagacctggtaaccaggaatgttacgacaattttctgcaatcaggagaaacagccaaaaccgacgcttctttccacgcctacgacagtcacaccaacacatattatctgcagaccttcgggcacaatacaatggacgccgtgcccaagatcgaatattacagaaacaccggttccattagcggacccaaagtgaaccgtcccagcctgctggagatccatgaacaactggcaaagaacgtggccgtgacccccagcagcgcggaccgtgtggcgaacggtgatggcatacccggagatgagcaggctgagaacaaggaggacgatcaggccggcgtggtcaaattcggctgggtgaaaggagtcctggtccgctgtatgctgaatatttggggagtgatgcttttcatccgcctgtcctggattgtgggagaggcgggcatcgggctcggtgtgatcattatcggcctgagcgtagtggtcaccaccctcactggcattagcatgtctgctatttgcaccaacggcgtggtgcggggcgggggagcctactaccttatcagtaggtccctcggccctgaatttggcggatccatcggcctcattttcgcgttcgccaacgctgtggcagtggctatgtacgttgtcggatttgcagagacagtggtcgatctcttaaaggagtcagatagcatgatggtcgatcccactaacgatatcagaattataggcagtattacagtcgttattctgttaggaattagcgtggcgggcatggagtgggaggcgaaagctcaggtgattttgctggttatcctattaatagccattgccaacttcttcatcggaactgtgatcccctcaaacaacgaaaaaaagtctagagggtttttcaattaccaggcatccatttttgccgaaaatttcggtccaagatttacaaagggagagggcttcttttcagtgtttgctatcttctttcctgctgcaacgggcatcttagctggcgctaacatttccggcgatctggaggacccacaggatgcaataccgcggggcactatgctggccatcttcatcactacagtggcttacctgggcgtcgcaatttgcgttggcgcctgtgtggttcgggatgcaactggcaacatgaacgacacaataatcagtggaatgaactgcaacggcagtgcggcctgtggccttggatacgacttctctagatgccggcatgaaccttgtcagtacggcctgatgaacaactttcaagttatgagtatggtttcaggattcgggcctctgatcactgctggtatcttctcagccacactctcaagcgctctggcttccctggtgtctgcacctaaggtgttccaggccctttgtaaggacaacatctataaggctctgcaatttttcgccaaaggttacggcaaaaataatgaaccgctgcgcggctacatactaacctttctcatcgctatggctttcatcctgatcgccgagctcaatacaatcgctcctatcatctctaactttttcctcgctagctacgctcttattaacttcagctgcttccatgcgtcttatgctaagtcacctgggtggcgccctgcatacggcatctacaacatgtgggtctctctcttcggggctgtactttgctgcgctgtcatgttcgttattaactggtgggcagcagtcatcacatacgtgatagagttcttcctctacgtttatgtgacctgcaagaagcccgacgttaactggggatctagtacacaggccctcagctacgtgtccgctctggataacgcgctggaactaaccaccgtcgaggaccatgttaagaattttcgaccacagtgcattgtattgaccggcggcccaatgactaggcccgcgttgctcgacataacccacgcattcaccaaaaacagcgggctttgcatctgttgcgaggtgttcgtgggacctaggaaactttgcgtgaaggaaatgaattccggaatggccaaaaagcaagcctggctgattaagaataagatcaaggcattctacgcggccgtggccgcggactgttttagagatggcgtgcggtcactgcttcaggcttctggcctgggcaggatgaaaccaaatacactcgtcataggctataaaaaaaactggcgtaaggcaccactcaccgagatcgagaactatgtgggcatcatccacgacgcgttcgattttgaaataggcgtggtgatcgttcgcatcagccaaggattcgacatttcacaggtgttgcaagttcaggaggaactggagcggctcgagcaagaaaggcttgcccttgaagctactatcaaagacaacgaatgtgaagaagagagtggtggcattcgtggacttttcaaaaaggcaggcaaactgaacataaccaaaactactcctaaaaaagacggctccatcaatacatctcagtctatgcatgtgggagagtttaatcagaaactcgtcgaggcaagtacacagttcaaaaagaagcaggagaaaggaaccatcgacgtttggtggctctttgacgatggcggactgacccttcttatcccctacattctgactctgcgaaagaagtggaaagactgcaaacttcgtatctatgtgggcggtaagataaacaggattgaggaagagaagatcgtcatggcgagcctgttaagcaagtttcgcatcaaattcgccgatatccatatcataggtgacattaatattcgccccaataaagaatcctggaaggtcttcgaggaaatgatcgaaccttaccgtctgcatgagagctgtaaggatctgactacagcggaaaaactgaagcgcgagaccccctggaagataaccgatgcagagttggaagccgtgaaggaaaagagttacagacaggtgcgcctcaatgagctgctccaagagcatagtagggccgcaaacctaatcgtgctctcactccctgtcgctcgtaaaggcagtatcagcgatctgctttatatggcatggctggaaatcctgactaaaaacctgccaccagtgcttttggtgaggggcaatcacaaaaatgtgctcacattttacagc

SEQ ID NO: 251072 - DNA, 3297 bp, synthetic construct
  misc_feature 1..3297: note = Description of Artificial Sequence: Synthetic coding sequence
  source 1..3297: mol_type = other DNA
atgtctctgaacaacagtagcaacgtgtttctggatagtgtcccttccaatacaaacagatttcaagtcagcgtcattaatgagaaccacgagagtagcgctgcagctgacgataacaccgatccaccgcactacgaagaaaccagttttggggatgaagcacagaagaggctgagaatcagctttaggccaggaaaccaagaatgctatgataactttctccaaagtggagagacggccaagactgatgctagctttcacgcctacgattcacacacaaacacttactatcttcagacctttggccataacaccatggatgctgttcccaagattgagtattacaggaatactggtagcatcagcggtccgaaggttaataggccgtctctgctggagattcacgagcaactcgccaaaaacgtcgctgtgacaccttcatcagcggaccgggtagctaacggcgacggaatcccaggcgacgagcaagcggaaaacaaagaagatgaccaggctggcgtcgtgaagttcgggtgggtgaagggagtgcttgtgaggtgcatgcttaacatctggggcgtcatgctgttcatcagactgagctggattgtgggtgaagcggggatcgggctgggggtaatcatcatcggactgagtgtggtcgttacaaccctgaccggcataagtatgagcgccatatgcacaaacggcgttgtccgaggaggaggagcctactaccttataagtcggagcctcggacccgagttcggaggatccatcggcctcatttttgcttttgcgaacgctgtcgccgttgcaatgtacgtcgtgggattcgctgaaactgtggttgaccttctgaaggaaagcgactcaatgatggtggaccctactaacgacataagaataatcggcagcatcacagttgtgatcctcctgggaatctcggtggccgggatggaatgggaggccaaggcccaggtcatcctgttggtaatcttattaatcgcgatcgctaacttctttatagggaccgtaattccaagcaacaacgagaagaagagccgcggtttttttaattaccaggctagcatctttgcagagaacttcggacccagatttaccaaaggcgagggtttcttctcagtctttgcaattttttttccggctgcaactggcattctcgcgggtgctaacatcagcggggacctggaagatcctcaagacgccatcccaaggggcaccatgctggcaatctttatcacaaccgtcgcctacctcggagtggctatctgcgtgggtgcttgcgtggtgcgagatgccactggaaacatgaacgataccattataagtggcatgaactgcaacgggtctgccgcttgtggactgggatacgattttagtagatgcaggcacgagccttgtcagtacggacttatgaacaactttcaggttatgtctatggtttccggcttcggtcctctcataaccgccggtatattctctgctacattgagcagtgcacttgcatccctggtgagcgctcctaaagtgtttcaggccttgtgcaaagacaacatctacaaggctctgcagttctttgcgaagggctacggcaaaaacaacgagccactgaggggatacatcctgacctttctgatcgccatggctttcattctgatcgcggagttgaatacaatcgctccaatcattagtaatttctttctggccagctacgcattaatcaacttcagctgcttccatgcgtcttacgcaaaatcccctggatggagacctgcctatggaatctacaacatgtgggtttcactgttcggcgcagtattgtgctgtgccgtaatgtttgtcattaattggtgggcggcagttataacatacgtgatcgagtttttcctgtacgtatatgtcacttgtaagaagccagatgtgaactggggcagtagcacgcaggcgctgagctatgtgtcagcccttgacaacgcattggaattgaccacagtggaggaccacgtgaagaattttcgcccccagtgcattgtcctcaccggcggccctatgaccagacctgctctgctcgatatcacacacgccttcaccaaaaattccgggctgtgcatctgttgtgaagtcttcgttggccctagaaaactgtgcgtaaaggaaatgaacagcggcatggcgaagaaacaggcttggctcattaagaacaaaatcaaggctttctacgccgccgtggctgcagattgctttcgcgatggtgtcagaagcctgctccaggcttctggtctgggaagaatgaagcctaacacactggtgattggttacaagaagaactggaggaaagcacctctgacagaaatcgaaaattacgtcggcattatccacgacgcgttcgacttcgaaatcggcgtcgtcatcgtgagaatttctcaggggtttgacatttcccaggtgttgcaagtccaagaggagcttgagagattggagcaggaacgcttggctctggaagccaccattaaggataacgaatgcgaggaggagagcggtggtatccgaggcctatttaagaaagctggaaagctcaacataaccaaaaccacaccgaagaaagacggatcaattaacaccagccaatctatgcacgttggggagtttaaccaaaaactggtggaggcttccactcaatttaagaagaagcaggaaaaaggcacaattgacgtatggtggctgtttgacgatggcggcctgaccctcttaataccctacatcctgaccctgagaaaaaagtggaaggactgcaagctccgcatttacgtgggcggcaagatcaacaggattgaagaagaaaagatagtcatggcttcattgctgagcaaattcagaattaagttcgctgacatacacatcatcggagatatcaacatcagacctaacaaggaaagttggaaggtgttcgaagaaatgattgagccttacagactgcacgagtcctgtaaggatctcactactgccgagaagctcaagagggagaccccctggaaaatcacagatgccgaactggaggctgtaaaggaaaagagctacagacaggtgaggcttaacgaactgctccaggagcactcacgcgctgctaacctgattgtgttgagcctcccagtagcacgtaagggctctatctccgatctcctctatatggcctggttggaaatactgactaaaaatctgccccctgtcctcctcgtccgcggaaaccacaaaaacgttttgaccttttacagc

SEQ ID NO: 251073 - DNA, 3297 bp, synthetic construct
  misc_feature 1..3297: note = Description of Artificial Sequence: Synthetic coding sequence
  source 1..3297: mol_type = other DNA
atgtcacttaacaactcctcaaatgtgttcctggatagcgtcccatccaacaccaatcgttttcaggtttcggtgattaacgaaaaccacgaatcgtcggcggcagccgatgataataccgaccctccacactacgaagaaacttccttcggcgacgaagcacagaaacggctgaggatctcatttaggcccggtaaccaagaatgttacgataacttccttcaaagcggcgaaaccgcgaaaactgatgcatcgtttcatgcatacgactcccatactaacacttactacctgcaaacttttggccataacactatggatgcagtccctaagattgagtactatcgtaacaccggttcgatctcgggtcccaaggttaacaggccttcgctgctggagatccatgaacagctcgcaaagaacgtcgctgtcacgccctcctcggcagatcgcgtcgcaaatggggatgggattccgggtgatgaacaggcagaaaacaaggaggatgaccaagcaggtgtcgtgaagtttggttgggtgaagggcgtcctggtgaggtgcatgctcaacatatggggtgtcatgctctttatcagattgagctggattgtgggcgaagccgggattggtttgggcgtgatcatcattggcctttcggtggtggtgactactctgactggaatcagcatgtcggccatctgcacgaacggggtcgtgcgcggaggaggtgcttactaccttatctcgcggagcctcgggcctgaattcgggggttctattggtctgatcttcgcatttgcaaacgcagtggcagtcgcaatgtacgtggtgggatttgcagaaaccgtcgtggaccttcttaaggagtctgattccatgatggtcgatccgacgaacgacatccggattatcggatccattactgtggtgattcttctcggtatctccgtcgcaggtatggagtgggaagcgaaggcgcaagtcattcttctggtcattctgctgatcgcaatcgccaatttctttataggaaccgtgatcccttcgaacaatgagaaaaagtctaggggcttctttaactaccaggcgtcaattttcgccgaaaacttcggtcccagattcaccaaaggagaaggtttcttctcagttttcgctatctttttccctgcggctactggaatacttgccggcgccaacatttcgggagatctggaggatccacaggatgcgataccacgcggtactatgctggcaattttcatcactaccgtggcgtacctcggtgtggcaatttgtgtcggagcatgtgtggtgcgggatgcaactggtaacatgaatgataccatcataagcggaatgaactgtaatggtagcgctgcatgtggccttggatacgacttttcgcgatgcagacacgaaccttgtcagtacggtcttatgaacaattttcaagtcatgtcgatggtgtccggatttggtccgctgattaccgccgggattttctccgccaccctgtcatccgcgctcgcatcgctggtgtcagctcccaaggtgtttcaggcattgtgcaaggataacatttacaaggccctgcagttctttgcgaaaggatacgggaagaacaatgagccactccggggttacatacttacgtttttgatcgctatggcattcatcctgatcgcagaattgaacaccatcgcaccgattatctcgaacttttttctggcatcctatgcattgatcaatttctcctgttttcatgcaagctacgcaaagtcgccaggatggcggcctgcatatgggatttacaacatgtgggtgtcgctctttggggcagtgctctgttgcgcagtgatgtttgttatcaattggtgggcagcagtgattacctacgtgatagaattctttctttacgtctacgtcacctgtaaaaagcctgacgtgaattggggtagctccactcaggcgctttcgtacgtgtcggccctggacaacgcgctcgaactcaccactgtagaggaccatgtcaagaactttcggcctcaatgtatagtgctcactggaggacctatgaccaggccggcactgctggatattacccacgcctttacgaagaactccggtctgtgcatttgctgtgaggtgtttgtgggacctcgaaagctctgcgtgaaagaaatgaactcagggatggcaaagaagcaggcatggcttatcaagaataagattaaggcattttacgctgccgtcgcggctgattgtttcagagatggggtgcgatccctgctccaggctagcgggctcggcagaatgaaacccaacaccttggtgataggatacaagaagaattggcggaaggcaccactgacggagattgagaattacgtgggcatcatccacgacgcattcgacttcgagattggcgtcgtcatcgtccgtattagccaaggtttcgatatatcgcaggtgcttcaggtgcaagaagaacttgaacgactggagcaggaaagactcgcactcgaggccactatcaaagataatgaatgtgaagaggagtcgggcggaatccgaggactcttcaagaaggcaggaaagctcaacatcactaagactaccccgaaaaaagacggaagcataaacacgtcacaaagcatgcatgtcggagagttcaaccaaaaacttgtcgaagcatcaacgcaattcaagaagaaacaagagaaaggaaccattgatgtgtggtggctgtttgatgatggtggactgactcttctgattccgtacatacttactcttcggaagaagtggaaggattgtaagctgagaatttacgtgggcggaaagattaatcggatcgaagaagagaagatcgtcatggcgagcctgctgtcaaagttcagaatcaaattcgccgatatccatatcatcggagacataaacatcagaccgaacaaagaatcctggaaggtctttgaggaaatgatagaaccttaccgcctgcatgagtcgtgtaaagatcttactactgccgagaagctcaagcgtgaaactccctggaagattaccgacgcagaacttgaagcggtcaaggaaaagagctaccggcaggtgcggctcaatgagctgctgcaagagcactccagagcagctaacctcattgtcctgtcccttcctgtggcacggaagggttccatctcggacctgctgtatatggcctggcttgagatacttactaagaaccttccaccagtcctgctcgtgcgaggtaaccacaaaaacgtgctgaccttctactcc

SEQ ID NO: 251074 - DNA, 3297 bp, synthetic construct
  misc_feature 1..3297: note = Description of Artificial Sequence: Synthetic coding sequence
  source 1..3297: mol_type = other DNA
atgtctctgaacaactcgtcgaacgtgttcctggattcagtccctagcaacacgaacaggttccaggtgtcggtgatcaacgaaaatcatgaatcctcggccgccgcggacgacaacactgatccaccacattacgaagaaacctcgttcggagatgaagctcagaaacggctccggatcagcttccgtccggggaatcaggagtgttatgacaactttctgcagtccggggaaaccgccaaaactgacgcctccttccatgcgtacgacagccacactaatacctactacctgcagactttcggacacaacactatggacgctgtgcccaagatcgagtactaccgcaatacgggatcaatttccggaccaaaagtgaatagaccttctctcctggagatccacgaacagttggccaagaacgtggccgtgaccccgtcgtcggcggatcgtgtcgctaatggcgatggtattcctggagatgagcaagccgaaaacaaagaggacgatcaggccggagtggtcaaattcggatgggtgaagggagtgcttgtcagatgtatgctcaatatctggggcgtcatgctgtttatcaggctgtcctggatcgtgggtgaagcaggcatcggactcggagtcatcatcattgggctttccgtggtagtgaccaccctgactggtatctcaatgtccgctatctgtactaatggcgttgtgcggggagggggagcctactacctcatcagccgcagcctgggccctgaattcggaggctcgatcggcctcatcttcgcatttgccaacgccgtcgcggttgcaatgtacgttgtgggattcgccgaaaccgtcgtcgatctgttgaaggagagtgactccatgatggtggacccgaccaacgatatcaggattatcggctcgataactgtcgtgattttgctgggcatctcggtcgccggaatggaatgggaagcgaaagcacaggtgatcctgctcgtgattctcttgatcgccatcgcgaatttctttattggaaccgtaatcccatcgaacaatgaaaagaagtccaggggttttttcaactaccaggccagcatcttcgccgagaatttcggcccgagattcactaaaggcgaagggttcttttcggtctttgcaatcttctttcccgcggctaccggcatcctcgctggagcgaacatctcaggagatcttgaggacccgcaggacgccatccctcggggaactatgctcgcaattttcatcaccactgtggcttacctgggtgtcgccatctgtgtgggagcatgcgtggtcagagacgcaaccggaaacatgaacgacaccattatctcaggcatgaactgcaacggcagcgcagcctgcggattgggttacgatttctcccggtgccgccacgaaccttgtcagtatggattgatgaacaatttccaagtgatgagcatggtcagtggattcggaccacttatcactgctggaatcttttcagctactctgtcctccgcacttgcgtcattggtgtccgccccaaaggtgttccaggcgctctgcaaggacaacatctacaaggcactccagttcttcgctaagggatacgggaaaaacaacgaacctctgcgcggttatatccttaccttcctcatcgccatggctttcatcctgatcgccgagctgaacaccatcgcgccgatcatcagtaacttcttcctggcttcctacgcgcttatcaacttctcgtgcttccacgcttcctacgcaaagtcgccgggctggcggccggcatacggaatttacaatatgtgggtgtccctgtttggggccgttttgtgctgcgccgtcatgtttgttatcaactggtgggccgccgtgatcacgtacgtcatcgaattcttcctctacgtgtacgtgacgtgcaagaaaccggacgtcaactggggcagctctactcaggcgctgtcctacgtgagcgctctggacaacgcactggaactgacgaccgtggaggaccacgttaagaattttcgcccgcagtgcattgtgctgaccggaggaccaatgactaggcctgcgctgcttgacatcacccacgcatttaccaagaactccggactgtgcatctgctgcgaagtgttcgtggggcccagaaaactgtgtgtgaaggaaatgaatagtggcatggccaagaaacaagcgtggctgatcaagaacaagatcaaggccttctacgcagccgtcgctgcggattgtttccgggatggagtacggtcactcctgcaagccagcggcctcggcaggatgaagccaaacactctcgtgattgggtacaagaagaattggcgcaaggcccctctgaccgagatcgagaattatgtcggaatcatccacgatgcatttgacttcgagatcggagtggtgattgtgcgcatcagccaaggatttgatatctcacaggtcctgcaggtacaggaagaattggaaagactggagcaagaaaggctggcgctggaagccactatcaaggacaacgagtgcgaagaagagtcaggaggtattcgcgggctcttcaagaaagcgggaaagctcaacatcaccaaaacgactcccaagaaggacggatcgatcaacacttcccaatctatgcacgtcggtgagttcaaccaaaaacttgttgaagcctcaacccaattcaagaagaagcaggaaaaggggaccatcgacgtttggtggttgttcgacgacggtggcctgaccttgcttatcccgtacatactgactctgcggaagaaatggaaggattgcaaactgcgcatttacgtgggaggcaagatcaatagaattgaggaggagaagatcgtgatggcctccctgctttcgaagttccgcatcaagtttgccgacattcacattatcggggatatcaatattcggcccaataaagaatcctggaaagtgttcgaggagatgatcgagccctaccggctgcatgaatcgtgcaaggacctcaccactgccgaaaagctcaagcgcgaaactccgtggaagatcaccgatgcagagctggaggcagtgaaagagaagagctacagacaagtccggctcaacgagctcctccaagaacatagcagggccgcgaaccttattgtgctctcgttgcccgtggctcgcaagggttcgataagcgacctgctgtacatggcttggctggagatccttaccaaaaatcttccgcccgttctgctcgtgcgcggaaatcataagaatgtgctgactttctacagc

SEQ ID NO: 251075 - DNA, 3297 bp, synthetic construct
  misc_feature 1..3297: note = Description of Artificial Sequence: Synthetic coding sequence
  source 1..3297: mol_type = other DNA
atgtcacttaataactcctcaaatgtgttcctggacagtgtcccatcaaacacaaaccgctttcaagtgtcagttataaatgaaaaccacgagagcagtgccgctgctgacgataacactgatcccccgcattacgaagaaacctcctttggagatgaagcacagaagcgacttcgaatttcttttcgtcctggaaatcaggaatgttatgacaacttcctgcaatcgggcgagactgccaaaactgacgcttcatttcatgcgtatgactcacacaccaatacttactatctgcaaactttcggtcacaacactatggatgctgttccgaaaattgaatactaccgcaataccggctctatatctggtccaaaagtaaataggccatcccttttggagatacacgaacaacttgcgaagaatgtcgccgtgacaccatcttcagctgaccgcgtcgccaatggagacggaatcccaggagacgaacaggccgagaataaagaagacgatcaggcaggtgttgtgaagtttggatgggttaaaggagttttagtccgctgtatgctgaacatttggggagttatgctttttattcggttgtcgtggattgttggagaagccggaatcggtctgggcgtcataattattggactttccgttgttgttacgacacttactggaattagcatgtcagcaatttgtaccaatggggttgtgagaggcgggggcgcatactaccttatttcgaggtcattgggacccgagtttggaggttcaattggactcattttcgctttcgctaacgccgttgctgtggcaatgtatgttgttgggtttgcagaaacagttgttgatttactgaaagagtctgattcaatgatggttgatccaacaaatgatatcagaataattggttccattactgtcgttattttgctgggaatttctgttgccggaatggaatgggaagcaaaggcacaggttatccttctagtcatactccttatcgccatcgccaatttctttattggaacggtgataccatcaaacaatgaaaaaaaatcacgaggattttttaattaccaagcttctattttcgccgaaaactttggaccccgatttacaaaaggagaaggttttttctcggtctttgcgattttcttcccagctgccactggaatcctcgcaggagctaacatctctggggacctggaagaccctcaagatgcaattccccgaggtacaatgctcgcgatcttcattacaacagtagcctatcttggagtcgcaatctgtgtaggtgcatgtgttgtgagagatgccacaggtaacatgaatgacactataatatcgggcatgaactgtaatggaagtgcggcatgcggactcggttatgatttttcgcgatgccgacatgaaccgtgccagtacggattgatgaataactttcaggttatgtcaatggtgtcgggcttcggaccgttaattaccgccggaatcttttctgcaacccttagcagtgcattggcaagtctggttagtgcgcctaaagtgttccaagccctatgtaaggataatatatataaagcacttcagttcttcgctaagggttatggcaaaaacaatgagccattgcgtgggtacatcctaacattcttgattgctatggccttcattctcatagccgaacttaacaccatcgcaccaatcatatctaacttcttcctcgcaagttatgcactcattaatttctcatgctttcatgcgtcttatgcgaaaagtccaggatggagacctgcatacggtatttacaatatgtgggtttcacttttcggagcagtcttgtgctgtgcagttatgttcgtgattaattggtgggcagctgttatcacatatgttattgagtttttcctttatgtttacgttacatgtaaaaagccagacgttaattggggatcctcaacccaagctttgtcctatgtgtctgctctggataatgccctcgaacttactactgtagaagaccacgtcaagaacttccggccacaatgcattgtgttgacaggaggaccgatgaccagacctgctctgcttgatataactcacgcttttacgaaaaattctggactgtgcatttgttgtgaagttttcgtaggaccccgaaagttgtgtgtcaaggaaatgaatagtggcatggccaaaaaacaggcgtggctgatcaagaataagataaaggccttctacgcggctgtggctgcagattgtttcagggacggggttagatcgctactgcaagcatctgggttgggtagaatgaaacctaacacgttggtgattggatacaaaaaaaattggcggaaagctccactgactgagatcgaaaattacgttggaattatccacgatgcctttgattttgagattggcgtagtgatcgtgcgaatcagtcaaggatttgatatatcacaagtgcttcaggtgcaggaagaactcgagaggctcgagcaagaaagacttgccctagaagccaccattaaagataacgaatgcgaggaagaaagtggaggaattcgtggactattcaaaaaagccggaaagcttaatattactaagactaccccaaagaaagatgggtcaattaacacttcgcaatcaatgcatgttggagaattcaatcaaaaattagttgaggcatcgacacaatttaaaaaaaaacaagaaaaaggtaccattgatgtttggtggttgtttgatgatggagggctcactcttttgatcccttacattttgacccttaggaagaaatggaaagattgcaagctgaggatttacgttggtggaaaaatcaaccgaattgaagaggaaaagattgtcatggcatcacttctttccaagttccggataaaatttgctgatattcatattataggagatattaacatcagaccaaataaagagtcttggaaagtttttgaagagatgattgagccatatagactgcacgaatcatgtaaagatctgacgacagcggaaaagctcaagagagagacaccctggaagatcaccgatgcagaacttgaggccgttaaagaaaaatcttatcggcaagtacgtctaaatgaactgttgcaagagcacagcagagcagcaaatcttatcgtactatcgctcccagttgctcgtaaaggctctatatctgatttgttgtatatggcatggctggaaattctaacaaaaaatcttcccccggtcttgttagtgaggggaaaccataaaaacgttctcactttttattct

SEQ ID NO: 251076 - DNA, 3297 bp, synthetic construct
  misc_feature 1..3297: note = Description of Artificial Sequence: Synthetic coding sequence
  source 1..3297: mol_type = other DNA
atgagtttgaacaacagctccaatgtcttcctggattctgttccaagtaatacgaataggttccaggtgtccgtcatcaatgagaaccacgaatcgagcgccgctgccgacgataatactgaccctcctcattacgaagagacatcttttggtgacgaagctcagaaacgtttgcgtatctcatttagacccggtaaccaagaatgttatgataatttcctgcaatccggcgagaccgccaagactgacgccagctttcatgcctacgactctcacacaaatacatattatcttcagacattcggtcacaatacaatggacgctgttcctaaaattgaatactatcgtaacaccgggtccatctcagggccaaaagtaaaccgacctagcctgcttgaaattcacgagcagctcgccaagaacgtggctgtcacaccatcttcagccgaccgcgtcgctaatggagacggcataccaggggacgaacaagctgaaaacaaagaggacgatcaagcgggtgtagttaaatttggctgggttaaaggcgtgcttgtgagatgtatgttgaatatttggggcgttatgctgtttattagattgtcatggattgtgggggaggcagggatcggccttggcgtcatcattattggactgtccgtggtcgtaactaccttgactggcatctcgatgagtgctatctgcacaaatggggtcgtaagaggcgggggggcctactacctgatcagccgctctttaggaccggagttcggaggcagtattggccttatctttgccttcgctaatgcggtggccgtcgccatgtatgtggtgggctttgccgaaacggtcgtcgacctgttgaaagaatcagattcaatgatggtggatcctactaacgatatccggatcatcggttccatcactgtggtaatcctgttagggatttctgtagctgggatggagtgggaggcaaaagctcaggtgatcctactggtaatcctgctcatcgccatagcaaatttcttcatcggaacagtcattccctcaaacaacgagaagaagagtagaggatttttcaactaccaggcctccatcttcgccgagaacttcggaccaaggttcactaagggcgagggattcttctctgtgttcgccatattcttccccgcagcaaccgggattttagctggagccaacatttctggtgacctagaggatcctcaagatgccatccctcgtgggaccatgctggcaatctttatcacaacagtggcctatctgggcgtggcaatatgcgtgggggcgtgtgtggtgcgcgatgctacgggcaatatgaatgataccatcatttccggtatgaattgtaatggttcagccgcttgtgggttagggtacgatttctcaagatgtcggcacgagccgtgccagtacggccttatgaacaacttccaggttatgtccatggtgtccggcttcggtccgttgattaccgccggcatctttagcgctacactgtcaagcgcactggcctcactggtctccgcccctaaagtatttcaggcattgtgcaaggataatatttataaggcgctgcaattcttcgccaaagggtacggtaaaaataacgaacccctgcgcgggtacatcctcaccttcctgatcgctatggcattcatccttatcgctgagctgaacacaattgctcccataatctctaatttcttccttgcgtcatacgctcttataaactttagctgttttcatgcctcgtacgcaaagagtcccggatggaggcccgcctacggaatttataatatgtgggtctccctgttcggagctgtactgtgctgcgccgtgatgtttgtcataaactggtgggccgccgttattacgtacgtgatagaattctttctgtatgtctacgtgacatgtaagaaacccgacgtgaactggggcagcagcacccaagcgctgtcatacgtgtctgccttagataatgccctggagcttaccacggtcgaggatcatgtaaaaaacttccggccccagtgcattgtgttgacaggaggaccaatgactaggcccgctctcctggacattacacacgcatttaccaaaaattctggactgtgcatctgctgcgaagtcttcgttggacctcggaagctttgcgtgaaagagatgaacagtggaatggcaaagaagcaggcctggctcatcaagaacaaaatcaaggctttttacgctgccgttgcagcggattgctttcgggacggggtgagatccctgctccaggcctctgggctgggtcggatgaaacccaacacgcttgttataggttacaaaaaaaactggagaaaagcccctttgaccgaaattgagaactatgtcggaataatccacgacgcttttgactttgagataggcgttgtgattgtaaggatatcccaaggatttgacatctcacaagttctacaggtgcaagaagagcttgagcgactggagcaggagcgccttgccctcgaagcgacaatcaaggataatgaatgcgaagaggagtccggggggatacgtgggctgttcaaaaaagcaggaaagctgaacataacgaagaccacacccaagaaagatgggtctatcaatactagccagtcgatgcacgtcggggaatttaatcagaagctcgtggaggcttctacccagtttaaaaagaaacaagagaagggaaccatcgacgtatggtggttgtttgacgacggcggcctaacgctgttgatcccgtatatccttacactacggaagaagtggaaagactgtaagttgcgaatatacgtcggtggtaaaattaatcggatcgaggaagagaaaattgtaatggctagccttctatcaaaatttagaattaagtttgccgacatccacattatcggagatattaatatccggcccaataaggagtcttggaaggtcttcgaggaaatgatagagccttaccgactacacgaatcatgtaaagatcttaccaccgctgagaaattgaaacgggagaccccatggaaaataacagatgccgaattggaagccgtcaaggagaaaagctataggcaggttcgtctcaatgagctgctgcaggagcatagccgggcggctaatctcatagttctgtcgctgcccgtggcgcggaaagggtctattagtgacctgctgtacatggcttggcttgagatcctgacgaagaatctccctccggtgctgctggtgaggggaaatcataagaatgtcctgaccttttattcc

SEQ ID NO: 251077 - DNA, 3297 bp, synthetic construct
  misc_feature 1..3297: note = Description of Artificial Sequence: Synthetic coding sequence
  source 1..3297: mol_type = other DNA
atgtccttgaacaactcttctaatgtattcctggatagtgttccttctaacaccaaccgcttccaagtgtcagtcatcaatgagaaccacgagagttctgccgctgctgacgataacacagaccctccacattacgaagagaccagtttcggagacgaagcccagaagaggctgaggatctcattcaggcccggtaaccaggaatgttacgacaactttcttcagagtggcgagactgccaagactgatgcctcttttcacgcgtatgattcccatacaaatacttattatctgcagacgtttggacataatacaatggacgcagtccccaagattgagtactacagaaatactggtagtattagtggcccgaaggttaacagaccctccttgctcgagatacatgaacagctcgccaagaacgtcgccgtcacaccttcctctgcagacagagttgccaacggagatggcattccaggagatgagcaggcagagaataaagaggacgaccaggcaggtgtggtcaagttcggctgggtgaaaggtgtgctcgtgcgctgtatgctcaatatctggggagtcatgctctttatcaggctctcctggatagtcggcgaagctggaatcggcctcggtgtcattatcataggcctgtcagttgtagtgacaaccctgacaggaatctcaatgagtgcaatttgcacgaatggagtggtgaggggcggaggagcctactaccttatctccagatccctcggtcccgagttcggcggctcaattggtctgatctttgctttcgccaacgctgtggcagtggccatgtatgtggttggcttcgcggaaacggtagttgacctgttgaaagagtctgattcaatgatggtggacccaaccaacgatatcagaatcatcggctcaatcacagtggtaattctgctgggaatatctgtcgccggcatggagtgggaagctaaggcccaggttatcctgctggtcattctcttgatcgcaattgctaacttttttattggtaccgtgatcccctctaacaacgaaaagaaatcccgcggttttttcaactatcaagcaagtatttttgccgaaaatttcggccctcgcttcactaaaggcgaaggattcttttcagtgtttgccattttttttccagccgccactggaatcctggcaggtgctaacattagtggtgacctcgaggacccccaggatgcgattccgagaggcacaatgctcgccatctttattacaaccgtagcttatctgggcgttgccatttgcgttggcgcctgtgtcgtgagagacgctactggaaatatgaatgacacaatcatctccggtatgaactgtaacggctccgctgcttgcggacttggatatgatttctccagatgtcgccacgagccctgccaatatggcctcatgaataacttccaggtaatgtcaatggtctcaggattcggaccattgattactgcaggaattttctccgctacattgagtagtgccctggcatctttggtgtccgccccgaaagtctttcaagccctttgcaaggataatatctacaaagctctgcagtttttcgctaaaggctacggaaaaaataatgagcctctgaggggatatatcctgaccttcttgatcgctatggctttcattctgattgcggagctgaacaccatcgcgccaattatttctaacttttttttggcttcctatgctcttatcaactttagctgctttcacgcatcctacgcgaaatcacccggttggaggcctgcatacggtatctacaacatgtgggtctctctgtttggcgctgttctttgctgcgctgttatgtttgtcatcaattggtgggccgccgtgatcacctacgtgattgaattctttttgtatgtgtacgtgacctgtaaaaagcctgatgtaaactggggcagctcaacacaggcactctcttatgtgtctgctcttgacaatgcactcgagcttactacggtggaagaccacgttaagaacttcagacctcagtgcatcgtgcttacaggaggtcctatgactaggcccgctttgctggatatcacgcacgccttcactaagaatagcggactttgtatctgctgtgaggtgttcgttggtccgaggaagttgtgcgtcaaagagatgaatagcggtatggcgaaaaagcaggcatggctcataaagaataagatcaaggcattctacgctgctgtggcagctgactgcttcagggatggcgttagatctctgctgcaagcatctggtcttggcaggatgaaaccgaacacactggttatcggatacaagaagaactggcgcaaggcaccgctgacagaaattgaaaattatgtgggcattatccacgatgctttcgatttcgagattggagtggtgatcgttaggatatcacagggttttgacatatcacaagtgttgcaggtccaggaggagttggagaggcttgagcaggagaggctggcactggaggccacaattaaggataatgagtgtgaagaggagtctggaggtattcgcggcttgttcaagaaagcgggcaagctgaacattactaagacgacacctaagaaagacggctccataaacacatcccagtcaatgcacgtcggtgagttcaaccagaagttggtggaagcttctacccagttcaagaaaaaacaggagaagggcaccatcgacgtctggtggctgttcgatgatggcggactgacactcttgatcccctacatcctgacattgagaaaaaaatggaaagattgtaaactccgcatctacgtaggaggcaagatcaatagaatcgaggaggagaaaatagttatggcgtctcttttgtccaagttcagaatcaaatttgctgacattcacatcattggcgatatcaacattagacctaataaggaatcatggaaggtatttgaagaaatgatcgagccttaccgcctccatgagagctgtaaagatctcaccacggcagagaaacttaagcgcgagaccccttggaagatcactgacgccgaattggaagccgtcaaggaaaagtcttacagacaggtaaggctcaacgaacttcttcaggagcactctagagctgccaatctcatagtgctgtcattgccggtggccaggaaaggttctatctctgatctgctctacatggcatggctggagatcctgaccaaaaacctcccaccagtgctgttggtgaggggaaaccataagaatgtactgaccttctattcc

SEQ ID NO: 251078 - DNA, 3297 bp, synthetic construct
  misc_feature 1..3297: note = Description of Artificial Sequence: Synthetic coding sequence
  source 1..3297: mol_type = other DNA
atgagcctgaacaactcgtctaacgtgtttctggattctgtgccaagtaacacgaatcggtttcaggtttcagtcatcaacgagaaccacgagagtagcgcggcagccgacgataacactgatcccccccattacgaggaaactagctttggcgacgaagctcagaagcgtcttcgaattagctttcggcccgggaaccaagaatgttacgacaatttccttcagtcaggagagactgctaagactgatgcctcctttcatgcctatgacagccacaccaacacctattacttacagacattcggacataataccatggatgccgttcctaagatagagtattacagaaatactgggtcgatctcaggccccaaagtcaatagaccatcattgctagagatccatgaacagctcgcaaagaatgtggccgtgacaccctcaagtgccgaccgagtcgcaaatggtgacggcattccgggagatgaacaagccgagaataaagaggatgaccaggctggcgtggtcaaatttgggtgggttaagggagtgcttgtgcgatgcatgttgaacatttggggagtaatgctctttatcaggttgtcctggattgtcggcgaggctggaattgggcttggagtcattattataggtctttcagtcgtggtgaccacccttacaggaatcagcatgagcgctatctgcaccaacggcgtggtgagaggcggaggagcctattaccttatctctagatcactggggcctgagttcggaggctctatcggtctcatttttgcttttgcgaatgccgtagcagtcgctatgtacgtggtgggattcgctgaaacagtcgttgacttgcttaaggaaagtgacagcatgatggtggatcctacaaacgacataaggataatcgggtcaatcactgtggtgatactgctgggaattagcgttgctggcatggagtgggaagccaaggctcaagtgattctactcgtaatcctactgattgccattgccaacttctttatcggtactgttatcccttctaacaatgaaaagaagtccagagggttctttaactatcaggcgagcatttttgctgaaaattttgggccacggtttactaaaggtgaagggttcttttcggtgtttgccatcttcttccccgcggcgacggggattctcgccggagctaacatcagcggggatctggaagacccccaagatgcgatccctcgcggaacaatgctggccatattcataaccaccgtggcatatttaggggttgcaatttgtgtgggggcttgtgtggtcagagacgcgacggggaatatgaacgacaccatcatatctggcatgaattgcaacgggtccgcagcctgtgggctgggatacgatttctcccgttgtaggcacgaaccttgccagtacggcctgatgaataactttcaggtgatgtctatggtgtcagggtttggccctttgattacagcgggcatcttcagcgcaacactctcttcagccctggctagcctcgtttccgcccccaaagttttccaggccctgtgtaaggataacatctacaaagcactgcagttttttgcgaaaggctatgggaaaaataatgaaccattgagggggtatatcctgacttttctaattgccatggcatttatcttaattgctgaattgaataccattgcccccatcatatctaacttcttcctcgcctcatacgctctaatcaatttctcctgttttcatgcttcttacgcaaagagtccggggtggcggcctgcctatggaatctataacatgtgggtgagtctttttggcgctgtgctttgctgtgccgtcatgtttgttataaactggtgggccgcagtgatcacatatgtgattgaattcttcctgtatgtctacgtgacttgcaagaaaccggacgtgaactggggcagctcgacgcaggccctgtcctacgtatccgccctggataacgctctggagctgaccaccgtcgaggatcacgtgaagaatttcagaccccagtgtattgtgctgacaggcggaccgatgaccagacctgctctactggatataacgcacgccttcaccaaaaattcaggactttgcatctgttgcgaggtgttcgttggaccccgcaaattatgtgtgaaagaaatgaacagcggcatggccaagaaacaagcctggcttatcaagaataaaatcaaagccttctatgcagctgtagccgcggattgcttccgcgacggagtgcggtctttgctccaggcctccgggttaggtaggatgaagcctaatactctagtgataggctacaaaaaaaactggaggaaggccccgttgaccgaaatcgaaaattacgtcgggatcatccatgatgcgttcgatttcgaaatcggcgtggtgatagtgagaatttctcagggattcgacattagccaggtgctccaggtgcaggaagagctggagcgcctcgagcaggagcggctcgctctcgaggccaccataaaggataacgagtgtgaggaggagagcgggggtatcagaggactgttcaagaaggctgggaaactgaacatcacaaagaccaccccaaagaaagatggttcaatcaacacgtctcagtctatgcatgtgggagagttcaaccagaaattggtggaggcctctacgcagttcaagaaaaaacaggagaagggcaccatcgacgtctggtggctgtttgacgatggaggcctgactctccttatcccatacattctcaccctacggaaaaaatggaaagattgcaaacttagaatctatgttggcggcaaaatcaatcggatcgaggaggagaagatcgtaatggcatcactgcttagtaagttcagaatcaagttcgccgatattcatattatcggggatatcaacatccggcccaacaaggagagttggaaagtattcgaggaaatgatagagccatataggctccacgagagttgtaaggacctcactaccgccgaaaagctgaaaagagagaccccgtggaagatcaccgatgcagagctagaggcagtgaaggagaagtcctaccgacaggttcgacttaacgagctgctgcaagagcattcaagggcagcaaacttgatcgttttatcacttcccgtggcccgaaaaggatcgataagcgacttgctgtacatggcgtggctggaaattctgacaaaaaacctcccgccagttttgctcgtgaggggaaatcataagaacgttctgaccttttacagc

SEQ ID NO: 251079 - DNA, 3297 bp, synthetic construct
  misc_feature 1..3297: note = Description of Artificial Sequence: Synthetic coding sequence
  source 1..3297: mol_type = other DNA
atgagtcttaacaattcatctaacgtttttttagatagtgtaccttcaaatactaatagatttcaagtttcagtgattaacgaaaatcatgaaagttctgctgctgccgatgataatacagatcctccacattatgaagaaacttcttttggagacgaagcacaaaagcgtttaagaataagttttcgaccaggaaatcaagaatgttatgataattttttacaatctggagaaactgcaaaaactgatgcatcttttcatgcttatgattctcatacaaatacatattatcttcagacatttggacataatactatggatgctgttccaaaaattgaatattataggaacactggaagtatttcaggaccaaaagttaatagaccatcacttttagaaattcacgaacaattagctaaaaatgttgctgttacaccttcttcagccgatagggtcgctaatggagacggaattccaggtgatgaacaagcagaaaataaagaagatgatcaagctggtgtcgttaaatttggatgggttaaaggagttttagttagatgtatgcttaatatatggggagttatgttatttatacgattaagttggatcgtaggagaagcaggaattggacttggagttataataattgggctatcagttgttgttactactttaactggaatttcaatgtcagcaatttgcacaaatggagttgtacgtggtggtggagcatattatcttatttctagatcattaggaccagaatttggaggatccattggacttatctttgcatttgcaaatgcagttgccgttgctatgtatgtggtcggttttgcagaaactgttgttgatttgcttaaggaatctgacagtatgatggttgatccaaccaacgatatcagaataattggatctattacagtagttatattattaggtatttcagttgctggtatggaatgggaagcaaaagcacaggtaatattattagttatacttctcattgcaattgctaatttctttattggtactgtgattccaagtaataatgaaaaaaagtctagaggattctttaactatcaagcatctatttttgcagaaaatttcggaccaagattcactaagggagaaggatttttttcagtatttgctattttctttccagctgctactggaattcttgcaggagcaaatatatctggagatttagaagatccacaagatgcaattccacgtggtactatgctcgcaatttttataacaactgtggcttatcttggagtagctatttgtgtaggagcatgtgttgtaagagatgctactggaaatatgaatgatactattatttctggaatgaattgtaatggttctgctgcttgcggtttaggttatgattttagtagatgtagacatgaaccatgtcaatatggacttatgaataactttcaagtgatgtctatggtttcaggatttggaccacttatcactgcagggatttttagtgcaacattatcatcagctttagcatcattagtaagcgcaccaaaagtttttcaagcactttgtaaagataatatttataaggctttgcaatttttcgctaaagggtatggtaaaaataacgaacctttacgaggatatatattaaccttcttaatagcaatggcatttatattaatcgctgaactcaacacaattgctccaataatttctaatttttttttggcttcatatgcattaatcaatttctcatgttttcatgcttcttatgctaaatctccaggatggagaccagcttatggaatttataacatgtgggtatccttatttggtgctgttttgtgttgtgcagttatgtttgttattaattggtgggcagcagtcataacttatgttattgagttttttttatatgtttatgttacttgtaaaaagccagatgttaattggggaagttcaacacaagcactttcctatgtttcagctcttgataatgctcttgaattaacaacagttgaagatcatgttaagaactttagaccacaatgtattgtactcactggaggacctatgacaagaccagctttactagatattacacatgcattcacaaaaaattcaggactttgcatttgttgtgaagtttttgttggacctagaaagctttgtgttaaagaaatgaacagtggaatggctaaaaagcaagcttggttgattaagaataaaattaaagctttctatgctgctgtcgcagctgattgtttcagagatggagttagatccttattacaagcaagtggattaggacgtatgaagccaaatacacttgttattggatataaaaaaaattggagaaaagctccacttacagaaatagaaaattatgtaggtattatccatgatgcttttgatttcgaaattggagtagtaattgttagaattagtcaaggttttgatatttcacaagttttgcaagttcaagaagaacttgaaagattagaacaagagagattagctttagaagcaacaattaaggataatgaatgtgaagaagaaagtggtggaattagaggtcttttcaaaaaagctggtaaattaaatattacaaaaacaacaccaaagaaagatggatctataaatacatcacaatctatgcatgttggagaatttaatcaaaaacttgttgaggcttcaacacaattcaaaaaaaaacaagaaaaaggaactattgatgtttggtggttatttgatgatggaggtttaacattattaatcccatatatattaactcttagaaaaaagtggaaagattgtaaacttagaatttatgttggaggaaaaattaaccgaattgaagaagaaaagattgttatggcaagtttattatccaaattcagaattaaattcgctgatattcatattattggggacatcaatattagacctaataaggaatcttggaaagtttttgaagaaatgatagaaccatatagacttcatgagtcttgtaaagatttaactacagctgaaaagttaaaaagagaaactccttggaagattactgatgctgaattagaggctgttaaagaaaaaagttatagacaagttagattaaacgaattattacaagaacatagtagagctgctaatcttattgtactttcattgccagttgcaagaaaaggaagtatttcagatcttctttatatggcatggcttgagattttaacaaaaaacttacctccagtattattagttagaggtaatcataaaaatgttttaacattttattca

SEQ ID NO: 251080 - DNA, 3297 bp, synthetic construct
  misc_feature 1..3297: note = Description of Artificial Sequence: Synthetic coding sequence
  source 1..3297: mol_type = other DNA
atgtcacttaacaattcatcaaacgtgtttctggatagcgtgccatcgaacacgaaccgcttccaagtctcagtgattaatgaaaaccatgaatcatccgcagcagcggatgataacactgatcccccgcactacgaagagacttcgtttggtgacgaagcccaaaaaagacttaggatctcctttagaccggggaatcaagaatgctacgataactttttgcagtccggcgagactgcaaagaccgatgctagctttcacgcgtacgattcacatactaacacttactaccttcaaacctttgggcataataccatggacgccgtgcctaaaatcgagtactatcgaaatactggttcgatttcagggcctaaggttaatagaccctccctgctcgagattcatgagcaacttgcaaagaatgtcgcagtcaccccttcgtcagccgatagagtggccaacggggatggtattcccggagatgaacaagcagagaacaaagaagatgatcaggccggggtcgtcaagttcggatgggtgaaaggtgtcttggtccgatgtatgttgaacatttggggagttatgctctttatacgtctctcgtggattgtcggagaggcaggcataggtcttggagtgatcattatcggactgagcgtcgtcgtgactaccctgaccggaatttcgatgtcggcaatttgcaccaatggcgtggtgagaggtgggggagcttactaccttatttctcgttcgcttggtcctgagtttggggggagcattggactgatttttgcgtttgccaatgcggtggccgtcgcgatgtacgttgtcggttttgcagaaaccgtcgtggacctgctcaaggagtcagattcaatgatggtggatcccaccaacgatattcggattatcggatcgattaccgtcgtgattcttctgggtatctcagtcgcagggatggaatgggaggcaaaagctcaagtgatccttcttgtcatcctgttgatagcgatcgcaaacttctttatcggaaccgtcattccgtcgaataatgagaagaaatcgagggggttctttaactaccaagccagcatttttgcagagaactttggtcctcggttcactaaaggcgaagggtttttctccgtgtttgcaatcttcttccctgccgccactggtattctggcaggtgccaacatttcaggtgacctggaagatcctcaggatgcaatacctagaggaaccatgctcgctatattcattaccactgtggcatacctgggagtggcaatttgtgtgggcgcatgtgtggtgcgagatgcgaccggaaacatgaacgataccataatctcaggcatgaactgtaacggatcggcagcctgtggactgggatatgatttctccaggtgtcgtcatgagccttgtcagtacggactgatgaataactttcaagtgatgtccatggtgagcggttttggcccgctgataaccgcaggaattttctcagcaactctcagctccgcacttgcctcactcgtgtcggcaccaaaggtgttccaagccttgtgcaaggataacatttacaaagcgctgcagttttttgcaaagggatacgggaagaacaacgagcctctgcgggggtacatcctgacttttctgattgcaatggcattcatcctgatcgcagaacttaacactatagcgcccatcataagtaatttcttcctggcaagctacgcactgattaacttctcgtgttttcatgcctcgtatgctaagtcacctggctggcgtccggcatacggcatttacaatatgtgggtgtccctttttggagcagtgctgtgctgcgccgtcatgtttgtcattaactggtgggcagctgtgattacttacgtgattgaattctttctgtacgtgtacgtgacttgcaagaagcctgatgtgaactggggctcctcgactcaggcactttcatacgtctcagcgctcgacaacgcacttgaactgactacggtggaagatcacgtgaagaacttcagaccacaatgtattgtgctcaccggggggccaatgactcggcctgcgctcctcgatatcacgcacgcgttcaccaaaaacagcggactgtgtatttgttgtgaagtgttcgtcggtcctaggaagctgtgtgtgaaggaaatgaacagcggcatggcaaagaagcaagcatggctgatcaagaacaagatcaaggcattctacgctgcggtggcagcagattgttttcgcgatggtgtcagatccctccttcaagctagcggcctgggccgaatgaagccaaacaccctcgtgattggttacaaaaagaactggcgaaaggcaccgcttaccgagattgagaactacgtggggatcattcacgatgcatttgacttcgaaataggggtggtgattgtgagaatctcccagggttttgacatttcgcaagtgctccaagtgcaggaagaacttgaacgcctggagcaagaacggctcgcactcgaggcaaccattaaggacaatgagtgtgaggaagaatccggtgggatacgggggctcttcaaaaaggcaggaaaactcaacattactaagaccactcccaaaaaggatggatcgatcaacacttcccagtcgatgcacgtcggggaattcaatcagaagctggtggaagcgtccacccagttcaagaaaaagcaggaaaaaggaaccattgatgtgtggtggctgtttgatgacggtggactgactctgcttattccatacattctgactctgaggaaaaagtggaaggattgtaaacttaggatctacgtgggaggcaagatcaaccggattgaagaagagaagatcgtgatggcgtccctcctgtcgaagtttagaataaagtttgcagatattcatatcatcggggacattaacatcagacccaacaaggaaagctggaaggttttcgaagaaatgatcgaaccataccgactgcatgagtcctgcaaggatctcactacggcagaaaaacttaaacgggaaaccccatggaagatcaccgatgcggaacttgaggcggtcaaggagaaatcctaccgtcaggtgagattgaacgaactgctgcaggaacatagcagagcagcaaacttgattgtgctctccctgcctgtggcaagaaagggtagcatctcggatctcctctatatggcatggcttgaaatcctgaccaagaatcttccgccagttcttctggtccggggaaaccacaagaatgttctgaccttctactcc

SEQ ID NO: 251081 - DNA, 3297 bp, synthetic construct
  misc_feature 1..3297: note = Description of Artificial Sequence: Synthetic coding sequence
  source 1..3297: mol_type = other DNA
atgtccctgaacaattcctctaatgttttcttggattccgtcccatcaaatacaaaccggtttcaagtttccgttattaatgaaaatcacgagtcatccgctgccgccgacgataataccgatcccccacattatgaagagaccagttttggagacgaagcccaaaagcgactgcgaatcagcttccgcccaggcaaccaggagtgttatgacaactttttacaatcaggggagacagctaagacagacgcatctttccacgcttacgactcccataccaacacctattatcttcagacatttggtcacaacactatggacgccgtgcccaaaatcgaatattatcgcaacacaggatccattagcgggccgaaggtgaacaggccatcacttcttgagattcatgagcagctggccaaaaacgttgcagtgaccccctctagcgcggaccgcgtggcgaatggcgacggtattccaggtgatgagcaagccgagaacaaggaggatgaccaggcgggcgtggttaagttcggatgggtgaagggggtgttggtgcgatgtatgcttaatatctggggagtcatgttgttcatccgcttaagttggatcgtgggcgaggccggtattgggctcggggtgataattatcggtctgagcgtggtggtgactaccctcaccggcatctccatgagcgccatctgtacaaatggagttgtgcggggcggaggagcatactacttgatctcaaggagccttggtcccgagttcggaggtagcatcgggcttatctttgccttcgccaatgcggtggccgtggccatgtatgtggtcggctttgctgaaacagtcgtggacctgctcaaagaatccgacagtatgatggtcgatcccactaacgacattaggatcattggctcgataacagtggtcatcttgcttggcatcagcgtggcgggaatggaatgggaggctaaagcccaggtgatcttgctggtcatcttgcttatcgccatcgcgaacttttttatcggaacggtcatcccctcaaacaatgagaaaaagtcccggggattcttcaactatcaggcctccatttttgctgaaaacttcggacctcggttcaccaaaggcgaaggtttcttctcagtgtttgctatttttttccctgccgctaccgggattctcgccggagcgaacatctccggggatctggaagatccccaggatgcgatcccgcgaggaactatgcttgcaattttcattacaacagttgcctacctcggagttgctatttgcgtaggggcctgtgttgtaagggacgccacggggaacatgaatgacacaatcatctctggtatgaactgcaatggatcggcagcctgcgggctcggatacgatttctcacgatgtcgccacgaaccatgccagtacggactcatgaataacttccaagtaatgtcaatggtctcagggttcggtcccctcatcactgccggtattttttccgccacattgtcctcagccctcgcgagtttggtatcagcccctaaagtgtttcaggctctgtgcaaagataatatatataaggcccttcaattcttcgccaaggggtacgggaagaacaatgaacctctaaggggatatatattaaccttcctcatagctatggctttcatcctgatcgcagagcttaatacaatcgcccctatcattagcaacttttttctcgcatcttatgctctaattaatttttcctgtttccatgccagctatgccaaaagcccaggatggcggccagcctatggaatttacaacatgtgggttagcctattcggcgctgtgctttgctgtgcagtgatgtttgtcattaactggtgggcagccgttataacgtatgttattgagttcttcctgtatgtttacgtcacatgcaagaagcctgatgtcaactggggcagcagcacccaagcactctcttatgtatctgccctggacaatgccctggagctcactacagtcgaggaccacgtgaagaacttcagaccacaatgtattgtcctgaccgggggtcccatgacacgacctgcccttttggacatcacccatgccttcactaagaactctggactgtgcatatgctgtgaggtctttgtgggccctcggaaactgtgcgttaaagaaatgaattccgggatggcaaaaaaacaggcttggcttataaagaataagatcaaggctttctacgccgccgttgctgcggattgcttccgggatggcgtcagatcactcctacaagccagtggcctcggtcgaatgaaacctaatactttggtgattggctataaaaagaactggagaaaagctcctttaacggagatcgagaactacgtcggcattatccacgacgctttcgacttcgaaataggtgtagtgattgtccgcatttcccagggattcgacatatcccaggtcctgcaggttcaggaggaactggagagattagaacaggaaagattggccctggaggccaccattaaagacaacgaatgtgaggaggagtcgggggggattcgagggttgttcaagaaggctggaaagctaaacatcacaaaaaccacccccaaaaaagacgggtccattaatacatctcaaagcatgcacgttggagagtttaaccagaagctggtggaggcctccactcaattcaaaaaaaaacaggaaaaaggtacgatcgatgtgtggtggctctttgatgatgggggtttgacgcttcttatcccttacatcttgactttacgtaagaaatggaaggattgcaaactccgtatatacgtgggagggaaaattaatagaatcgaagaggagaaaatcgtgatggcttcactactgtcaaagttccgcataaaattcgctgacatacatataataggcgacatcaatattcggcccaataaggaatcctggaaggtttttgaggagatgatagaaccctacaggcttcatgaatcttgtaaggatctcaccacagcagagaaactcaagagagagaccccatggaagattacagacgcagaattggaggccgtcaaggaaaaaagttatcggcaggtgcggcttaatgagttactgcaggaacacagccgagcagccaacctaatagtgttgagtctacctgtggcgaggaagggaagcatatccgacttgctctacatggcttggttggagatcctaaccaagaaccttccccctgtgctgctggtgagagggaaccataaaaacgtcttaaccttttacagt

SEQ ID NO: 251082 - DNA, 3297 bp, synthetic construct
  misc_feature 1..3297: note = Description of Artificial Sequence: Synthetic coding sequence
  source 1..3297: mol_type = other DNA
atgtcattgaacaactccagcaatgttttcctggactctgtgcccagtaacacaaataggttccaagtctcggtgataaacgagaatcacgagtcttccgcagccgcagacgataataccgatcccccccactacgaggaaactagctttggcgatgaagctcagaaacggctgagaatttctttccgacctggtaaccaagagtgctacgacaattttctgcagtcaggagagaccgccaagacagatgcctcgtttcacgcatatgatagtcacacaaacacatactatctccagactttcggccacaacactatggacgctgtgccgaagatcgagtattaccgaaatacagggtccattagtggccctaaggtgaacaggccctccttgttggaaattcatgaacagctcgccaagaacgtggcagtcacaccaagctctgcagaccgagtagccaacggagacggcattccgggcgatgagcaagccgagaataaagaggacgatcaggcaggtgtggtcaagttcgggtgggtcaagggcgtgctggtacggtgcatgctgaacatctggggtgttatgctgttcatacgattgtcctggatcgtaggggaagccgggatcggcttaggagtgataatcataggcctgtccgtcgtcgttactacgctgaccgggattagcatgagtgcgatttgtacaaatggggtcgttcgcggtggcggcgcgtactacctgatcagtcgcagcttaggccctgaattcggcgggagcataggcctaatatttgctttcgccaacgctgtggctgtggcgatgtatgtggttgggttcgccgaaacagtggttgatctgttgaaagaatcagatagcatgatggtggaccccaccaatgacattagaataataggcagcatcaccgtggtaattcttttgggtatctctgtcgccggcatggagtgggaagccaaggcccaagtaattctgctggtgattctgctgatcgccatcgcgaatttctttatcggtacggtgattccctcaaacaacgagaagaagagtagggggttttttaactatcaggcttcaatatttgccgaaaattttgggcccaggtttaccaagggagaggggtttttttcagtcttcgcgattttcttccccgccgccactggcatactggccggcgctaatatcagtggcgacctggaggatccacaggatgctatcccaagggggactatgttggcaatttttatcaccactgtggcctacttgggggtggccatctgtgttggagcttgtgtggtacgcgacgctaccgggaacatgaatgacactattatttcaggcatgaattgcaatggttcggctgcctgtggccttggctacgacttctctcggtgtagacatgagccgtgccagtacggcctgatgaataattttcaggtcatgagcatggtcagtggattcgggcctttgataacagcgggaatatttagcgccaccctgagctcagcgctcgctagcctggtctcggccccaaaggtgtttcaggctctgtgcaaagacaacatttacaaggctctccaattctttgccaagggatacggaaagaacaacgaacctttgaggggatatatcttgacgttcctgattgccatggccttcatattgatcgccgagctgaatactattgctccaataatcagcaattttttcctagccagttatgcccttataaatttcagctgctttcatgcctcatacgcaaagagtccgggctggaggccagcttacggaatttataatatgtgggtatcgttattcggagccgtattgtgctgcgccgtaatgtttgtgatcaattggtgggcggccgtgatcacttacgtgattgagttttttctttacgtatacgtgacttgtaaaaagcctgatgtgaattggggtagctctacacaggcactctcctacgtaagtgcccttgataacgctctcgagcttaccaccgtggaagatcacgtgaagaattttcggccacagtgcatcgttttaaccggtgggcccatgactcgacctgctcttttggatattacccatgcgtttactaaaaattctggcctctgcatttgttgtgaggtcttcgttggacctaggaagctatgcgtgaaagagatgaattccgggatggccaagaagcaggcatggctgattaagaacaaaattaaagccttctacgcagccgtagcggctgattgtttccgcgacggagtgcgtagtttgttgcaggcgtccgggcttggtcgtatgaaaccaaacaccctggttataggatacaagaaaaattggcggaaggcccccctcactgagattgaaaactacgtcgggatcatccacgacgcttttgactttgagatcggggtggtcattgtgaggatttcacagggattcgacatcagccaggtcctccaagtgcaagaagagctggaaagattagaacaggagaggctcgctctcgaagccaccatcaaggacaacgagtgcgaggaggaatctggaggaatccggggtcttttcaagaaggcgggaaagctcaatatcactaagacaacccctaaaaaggacggaagtatcaatacatctcagagcatgcacgttggggagtttaatcaaaagcttgtggaggcttctacacagtttaaaaaaaaacaggagaaggggaccatcgatgtgtggtggctctttgacgacggagggctgaccctgttgattccatacatcctgacattacggaagaagtggaaggactgtaagctgcggatttacgtcggcggcaaaatcaatagaatagaggaagaaaagattgtgatggcctcactgctcagtaaattcaggattaaatttgccgacatacacattatcggagatataaatatccggcctaataaagagtcgtggaaagtgttcgaggagatgatcgaaccctaccggttacacgaatcctgtaaggacctgacaacagccgaaaagctgaagcgggagaccccctggaagataactgatgcagagcttgaagccgtcaaggaaaagtcctaccgtcaggttcgtctcaatgagttgctgcaagagcattcccgggcggctaatcttattgttctgagtctgccagttgcgaggaagggttcaatctcggacctgctgtacatggcttggttagagatcttgaccaagaacctgccccctgtgttgcttgttcgaggtaatcataagaatgtcttgactttttattcc

SEQ ID NO: 251083 - DNA, 3297 bp, synthetic construct
  misc_feature 1..3297: note = Description of Artificial Sequence: Synthetic coding sequence
  source 1..3297: mol_type = other DNA
atgtcactcaacaacagctcaaatgttttccttgactcggtcccttccaacacgaaccgcttccaagtgtctgtgatcaacgaaaaccacgagtccagtgcggcagccgacgacaacaccgacccgccacattacgaggagacttcgtttggggacgaagcgcaaaagcggctcagaatctccttcagaccaggcaatcaggaatgttatgataacttcctgcaatcaggggaaaccgccaaaaccgacgcctcgtttcatgcctacgactcacacacgaacacctactaccttcaaacgttcggacataataccatggacgcggtacctaagatcgaatactaccgcaacactgggagcatctcgggcccgaaggtgaatcggcctagcctccttgagatccacgaacagctcgcaaaaaacgttgccgtgactccgagttccgcggatcgcgttgcaaacggtgacggaatcccgggcgatgagcaagcggagaataaggaagatgatcaggctggagtggtgaagttcggatgggtgaaaggagtgttggtgcgttgcatgttgaacatctggggtgtgatgctgttcatccggctcagctggatcgtgggagaggccggcataggcctcggtgtgatcatcattgggctgagcgtggtcgtgaccaccctgaccgggatctccatgtccgcgatttgtaccaacggtgtcgtgcgagggggcggggcttactacctgatctcacggagcctgggaccggagttcggtggctcgatcggactgatcttcgcatttgctaacgcagtggccgtcgctatgtacgtggtcggattcgcagaaaccgtggtcgatctgctcaaagaatctgattctatgatggtggacccgactaacgatatccggatcatcggatcgattaccgtggtgatccttctcgggatatccgtggcgggcatggagtgggaggcgaaggcacaggtgatcctgctggtgattctcctcatcgccatcgctaactttttcatcgggacggtgattccaagtaacaatgagaaaaagagcagaggatttttcaattaccaagccagcatcttcgccgagaatttcgggccaagattcactaagggagaaggtttcttttcggtgttcgcgattttcttccctgccgccaccggcatcctcgcgggtgccaatatctcgggagatctcgaggacccacaagacgctatccccaggggtactatgctcgctattttcatcaccaccgtggcctaccttggagtggcgatctgcgtgggcgcgtgcgtggtccgcgatgccaccggaaacatgaacgacaccatcatctcaggaatgaactgcaacggatcggcggcctgcggacttggatacgatttctcacgctgccgtcatgagccttgccagtacggccttatgaataactttcaagtcatgtccatggtgtcaggattcggacctctgatcactgctggcatcttctcagccacgctgtcctccgcactggcctcgctcgtcagtgctccgaaagtgttccaggcgctgtgcaaagacaacatttacaaagccctgcagttcttcgcaaagggatacggaaagaacaacgaaccactgagaggctacatcctgaccttcttgatcgccatggcgttcatcctgatcgcagaactgaatactatcgcccccatcatatcaaatttctttctggcctcgtacgcgttgatcaatttcagctgcttccacgcaagttacgccaagagcccaggatggcgccccgcctacggaatttacaacatgtgggtgtcgctgttcggggccgtcctgtgttgtgccgtcatgttcgttatcaactggtgggcggccgtcatcacctacgtgatcgaattctttctctatgtctatgtgacctgcaagaagccggacgtgaattggggttcgagcactcaggccctgagctacgtctctgcactggataacgctctcgaattgaccactgtcgaggaccacgtgaagaacttcagaccccagtgcatcgtgctcaccggagggccgatgaccagaccggcgctcctcgatatcactcacgctttcactaagaactcaggactgtgtatctgttgcgaggttttcgtcggaccgcgcaagctctgcgtgaaggaaatgaattcaggaatggccaaaaagcaggcttggctgatcaaaaacaagattaaggctttttacgctgcagtggccgccgactgcttccgcgacggagtccgctcactcctgcaagcctccggcctcggaaggatgaagccaaacactctggtgataggatacaaaaagaactggcgcaaggccccgcttacggaaattgaaaactatgtaggaattatccacgatgcgtttgacttcgagatcggtgtggtcatcgtgcggatctcacagggcttcgatatctcgcaagtgttgcaggtgcaggaggaattggagcgcctcgaacaggagcggctcgcactggaagccactatcaaggacaatgaatgcgaagaagaatccggtggaattcggggactgtttaagaaggctggaaaactgaatatcactaaaactactccgaaaaaggatggaagcatcaacacttcgcagtccatgcatgttggtgaattcaatcagaagctggttgaagcgtcgacccaattcaaaaagaaacaggagaagggcaccatcgacgtgtggtggctgtttgacgacgggggcctgactttgctcatcccatatatccttactttgcggaagaagtggaaggactgtaaactgcgcatctacgtgggagggaagatcaatagaattgaggaggaaaagatcgtcatggcaagcctgttgtcgaagtttaggatcaaatttgcggatatccacatcatcggggacatcaacattcgaccgaataaggaatcgtggaaggtgttcgaagaaatgatcgagccctaccggctgcacgagtcctgcaaggatttgaccaccgcggagaagctgaagcgagaaaccccttggaagataacggacgccgaactcgaggctgtgaaagaaaagtcctaccgacaggtccgcctgaacgagctgttgcaggaacattccagggcagcgaatcttattgtcctctcgctgccggtggcaagaaaaggcagcatcagcgacctcctctacatggcctggctcgagatactgactaagaacctgccgccggtgctgctggtgaggggcaatcacaaaaacgtgctcactttttactca

SEQ ID NO: 251084 - DNA, 3297 bp, synthetic construct
  misc_feature 1..3297: note = Description of Artificial Sequence: Synthetic coding sequence
  source 1..3297: mol_type = other DNA
atgagcctgaataatagtagtaatgtctttcttgattctgtgccctccaacaccaatcgatttcaggttagcgtgatcaatgagaaccacgagagttccgccgctgccgacgataacaccgaccctccacactatgaagagaccagctttggcgacgaagcgcagaaaagactgcgcattagcttcagaccaggcaatcaggagtgttacgataactttctgcaatcaggagagaccgccaagacagatgcttcctttcatgcatacgacagtcatacaaatacctattatttgcagacctttggtcacaatactatggacgcggtaccaaaaatcgagtattaccgaaacaccggctctatatcaggtccaaaggtcaatcgcccctccttgctggagatacacgagcagttggctaagaatgttgccgtaacaccctctagtgccgacagggtcgcaaatggggacgggattcctggcgacgaacaggccgagaataaggaggatgaccaggccggggtagtgaaattcggttgggtaaagggagtgcttgttcgatgtatgctcaacatatggggagtgatgctcttcattcggctaagttggattgtgggtgaagcgggtattggtctcggggtgattatcatcggactgtctgtggtggtcacaactctcactggtatttctatgagtgcaatctgcacaaatggggtggtgagaggaggtggagcgtactacctgatttctcgctctctcggccccgagttcggaggctcgatcggacttatcttcgcttttgcgaacgcggtggctgtggctatgtacgtcgttggatttgccgaaaccgttgtggaccttctcaaagaatccgactcaatgatggttgatcctaccaacgatattcgtataattggctcaatcactgtggtgattttactcggtatctcggtcgcagggatggaatgggaggctaaggcccaggttatcttgcttgtaattctgctgattgccattgctaatttctttattggcacagttatcccttctaataacgaaaaaaagagccgcggattcttcaattatcaggcaagcattttcgcagagaacttcggccctaggttcactaagggggaaggctttttcagcgtcttcgcaatcttttttcccgcagccaccggcatactggctggggcaaatattagtggtgaccttgaggacccgcaagacgctattcccaggggcacaatgctcgctatcttcattaccactgtcgcctacctgggagtggccatctgtgtaggagcatgtgtggttcgcgatgcgacaggcaatatgaatgacacaataatctctggcatgaactgtaatgggtcggccgcttgcggccttggatacgacttctcccggtgccgccatgagccttgtcagtacggactgatgaataactttcaagtcatgagtatggtctctggattcggcccacttattactgcgggcatcttctcggccactctgagtagcgcactggcaagcctggtctctgcacccaaagtgttccaggcactttgcaaggacaatatatataaagccctgcaatttttcgctaaaggttatggaaagaacaatgaaccgctccgggggtatattctcacattccttatagccatggccttcattttgattgccgagctgaacactatcgctcccataatttcaaacttcttcttggcatcttacgccctgataaatttcagctgctttcatgctagctatgctaagtctcccggatggaggcccgcctacggcatatataacatgtgggtgtcactgttcggggccgtactatgctgcgcagtgatgttcgtaataaactggtgggctgctgtgatcacctatgttatcgagttttttctctatgtctacgttacctgtaaaaagcccgatgtcaattggggcagctctacccaggcactgagttatgtgtcagcacttgacaatgcgcttgaattgactacagttgaggatcacgtgaagaactttcgtccacagtgcattgttctgactggaggacctatgacccgacccgcccttctggacatcacccacgccttcactaaaaactcaggactgtgtatctgctgtgaagtatttgtcgggccgcggaaattgtgcgtgaaagagatgaactcaggtatggctaaaaagcaggcttggctgattaagaataaaatcaaggctttctacgcggctgtcgcggcagattgttttcgcgacggtgtgaggagcctgctacaggcatcgggcctcggaaggatgaagcctaacactttggtcataggctacaagaagaactggagaaaagcacccctgaccgagatagagaattacgtgggcatcattcacgacgcgttcgacttcgagatcggagtggtcatcgtgaggatcagccagggcttcgacatttcacaggtgcttcaggtacaagaagaactggagcgcttggaacaggaaagattggcactcgaggccacaatcaaggacaatgagtgcgaggaagagtccggtggtatccgtgggctttttaagaaggccggaaagctcaatatcaccaagacaacacccaaaaaggatggctctatcaatacttcccagtccatgcacgtcggcgaattcaaccagaaactcgtggaagcctcaacacagtttaagaagaagcaagagaagggcaccatcgatgtttggtggctctttgatgacggcggtctgactctcctgataccatacattctgacattacgaaaaaaatggaaggactgcaaactgcggatttatgtgggcgggaagatcaataggattgaggaagagaagattgtgatggcaagcctgttgtctaaatttagaatcaaatttgctgatatccacatcatcggtgatattaacatccggcccaataaggaatcttggaaggtgttcgaagaaatgattgagccgtaccggcttcacgagagctgtaaggatctgaccaccgcggaaaagctgaagcgagagaccccgtggaagatcactgacgctgaactcgaagccgtcaaggagaaaagctatagacaggtcagactgaatgaactgctgcaggagcacagtcgggccgccaatctgattgttttgagtctgcctgtcgctcgcaaggggagtataagtgacctgctttacatggcctggctggagatcttgaccaaaaatctgcctcctgtgctgctcgttagagggaatcataaaaacgtattgaccttctacagc

SEQ ID NO: 251085 - DNA, 3297 bp, synthetic construct
  misc_feature 1..3297: note = Description of Artificial Sequence: Synthetic coding sequence
  source 1..3297: mol_type = other DNA
atgtccttgaacaattcatctaacgtctttctggacagcgtgccatccaacacaaacaggtttcaggttagtgtaattaacgagaaccacgaaagtagtgccgcggccgacgacaatacagatcccccccattatgaagaaactagttttggggacgaggcccagaagcgactgcggatctccttccggccaggtaaccaggagtgttatgataactttttgcagtctggcgagaccgctaaaactgacgcttccttccatgcatatgactcacacaccaatacgtactatctgcagacctttgggcacaatactatggacgcggtaccaaaaatcgaatactacagaaataccggatctatcagcggccctaaagttaaccggccttcgctgttggagatccatgaacagttagccaaaaacgtagccgtgactccatcttcggccgatagagtggctaatggagacggcatccctggggacgagcaggcagagaacaaggaggatgaccaggccggagtcgtcaaattcggatgggtgaagggagtcctggtgcggtgtatgcttaacatctggggtgtgatgctttttattcgcctttcatggatcgtgggcgaggccggcatcggtctgggcgtaattatcattggactgtcagtcgtcgtgaccacccttacaggtataagtatgagcgcgatctgtaccaacggggtggtgaggggaggcggggcttactatctgatatcccgctccctgggccctgaattcggcggcagtatcggcttaatctttgcctttgcaaacgctgtggcggtggcaatgtatgtggtgggtttcgcggaaacagtagtggacctgctaaaagaatctgactccatgatggttgatccaaccaatgacattagaattatcggctctatcactgtggtcatacttctcggaattagcgtggcgggtatggaatgggaagcgaaagctcaagttatacttctggtgattctcttgatagccatcgccaattttttcatcggcaccgtgattcctagtaataacgagaaaaagtctcgtggattttttaactatcaagccagcatttttgctgagaatttcggtcccagattcactaaaggcgaagggttctttagcgtgtttgctatctttttccctgcagcgactggcatcctggcaggggcgaatatatctggagatctggaagacccccaggatgccatacccagaggaaccatgctggcaatattcatcacaaccgtggcctacttgggagtggccatttgtgtcggagcatgcgtagtcagagatgcgaccggaaatatgaacgacactattataagtggaatgaattgcaacggcagcgcggcttgtggactgggctacgactttagtcggtgtaggcacgagccctgccagtacggcctgatgaataatttccaggttatgtctatggttagcggatttggaccgctgataactgccggtatattctccgcaacactctcgtcagctctggcgagccttgtctccgcccctaaagtgtttcaagcgctgtgtaaagataacatctacaaagctctccagttctttgcgaaggggtatggaaagaacaacgaacccttgcgggggtatattctgacctttctaatcgccatggcgtttatcctgatcgcagagctgaatacaatcgcccccatcatttctaacttttttctcgcaagctatgcactcattaatttcagctgcttccatgcctcctatgcaaaatctcctggctggcgcccagcctacggcatttacaatatgtgggtgagcttgtttggtgcagtactatgttgtgcggtcatgttcgtcattaattggtgggccgctgtaattacttacgtaatcgaattctttctctatgtctatgttacgtgcaaaaagccagacgttaattggggctcctcaacccaggccttaagttacgtgagcgcactagataacgcgctggagttgacgacagtcgaagatcacgtaaaaaactttagaccgcaatgtatcgttctgaccggagggcctatgacacgccctgccctactggacataactcacgccttcaccaagaacagcggcctgtgtatatgctgcgaggtgttcgtcggcccaagaaagctctgtgtcaaagaaatgaacagcggcatggctaagaagcaggcgtggctcatcaagaacaagatcaaagccttttacgctgctgtggcggctgattgttttagggacggagttaggagcctcctgcaggcatcgggactgggtcgaatgaagccaaacacactggtaattggctataaaaagaactggaggaaggctccattgacagaaatcgaaaattacgttgggataatccatgatgcttttgactttgagatcggggtggtgatagtaaggatatcccagggtttcgacatctcacaggttctacaggttcaggaagaactggaacggctggagcaggaacggctggccctcgaagccaccattaaagacaatgagtgcgaggaggaatctgggggcataagggggctgttcaaaaaggcaggtaaactgaatatcacgaaaaccacccctaagaaagacggctccatcaacacctcccagagcatgcatgtgggcgagttcaaccagaagctggtcgaggcatccacccagttcaagaaaaaacaggagaaagggaccattgatgtctggtggctctttgatgatggcgggctgaccttgctcattccctacatcctgactctacggaaaaaatggaaagactgcaagctgcgcatttacgtgggaggtaaaatcaatcgcatcgaagaagagaagatagtcatggcctcactattgagcaagtttaggattaaattcgccgatattcatattattggtgacattaacattcggccaaacaaggaaagctggaaagtgttcgaggagatgatagaaccttatcggcttcatgaatcttgcaaagatcttactaccgctgagaaactgaaacgggagacaccatggaaaattaccgacgccgagctcgaggctgttaaggagaagtcctatcggcaggtgcggttgaacgaactgctccaggagcatagtcgtgctgccaatttgatcgtgctgagcctgcccgtcgccaggaaggggagtatctctgacctcctgtacatggcatggctagaaatcctgacaaagaatctcccgcctgtcctccttgtgagggggaaccacaagaatgtcctgactttctactca

SEQ ID NO: 251086 - DNA, 3297 bp, synthetic construct
  misc_feature 1..3297: note = Description of Artificial Sequence: Synthetic coding sequence
  source 1..3297: mol_type = other DNA
atgtctctgaataacagctccaacgtgttcttggactccgtgccttcaaacacaaacagattccaggtgtccgtgatcaatgagaaccacgaatcttccgctgccgctgacgataacactgatcccccacattacgaggagacctcctttggagatgaagctcagaaaaggttgcgtatttcctttagacccggcaatcaggagtgttatgataacttccttcagtccggcgagactgctaagactgatgcctccttccatgcttatgattctcacactaacacctattatctccagacctttggacacaataccatggatgcagtgccaaagattgaatactacagaaacaccggctccatttccggcccaaaagtcaaccgtccaagtctcctcgagatccacgagcagctcgccaagaacgtggccgtgactcctagctctgctgaccgtgtggcaaacggcgatggcatccctggcgacgaacaggctgagaacaaggaggacgaccaagctggagtggtgaaattcggatgggtcaagggagtcctggttcgctgtatgcttaatatttggggcgtgatgctcttcattaggctgagctggattgttggtgaggctggaatcggactgggcgtgatcatcattggtttgtctgtggtggtcaccaccctgacaggaatcagtatgtcagcaatctgcactaatggcgtcgtgaggggaggcggtgcctactacctgattagccgcagcctgggccctgaattcggaggttcaattggcttgattttcgctttcgccaatgcagttgctgtcgccatgtacgtcgtcggcttcgccgagactgttgtagacttgttgaaggaaagtgactcaatgatggtcgaccctaccaatgatattagaataataggatccattacagtagtgatcttgctcggtatcagcgtggccggaatggagtgggaagctaaggcccaggttatccttctggtcattctcctcatcgccatcgccaactttttcatcggaacagtcatccctagcaacaatgagaagaagagcaggggttttttcaactaccaggcttccattttcgctgaaaattttggtcctcgcttcactaaaggtgagggtttcttctctgtcttcgccatattctttcccgctgccaccggtattcttgcaggtgccaatatctccggagacctcgaggatccccaggacgctatcccccgcggtactatgctggccatattcatcactactgtggcctatctgggcgtggccatctgtgtaggtgcctgtgtcgtgagagatgccacaggaaatatgaacgacactattatcagcggcatgaattgtaacggatccgctgcatgtggccttggttacgatttctccaggtgccgccacgagccttgccaatacggcttgatgaacaactttcaggtgatgtccatggtatctggatttggacctctcattaccgccggaattttctcagccactcttagcagtgccctggctagcctggtaagtgctccaaaggtgtttcaggctctgtgcaaggacaacatctataaggcactgcaattctttgcaaagggctatggcaagaataatgagccactcagaggctacatcctgactttcctgatcgctatggcctttatcctgattgctgagctgaacaccatcgccccaataatcagcaacttctttcttgctagctacgctcttatcaatttcagctgtttccacgcatcatatgccaagtcccctggttggcgccctgcttacggtatttacaacatgtgggttagcctcttcggcgctgtgctctgttgcgccgttatgtttgtcattaattggtgggccgcagttatcacatacgtaattgagttcttcctgtatgtttatgtcacctgtaagaagccagatgtgaactggggttcaagcacccaggcattgtcctatgttagcgcactggataatgctctggaactgaccaccgtcgaggaccacgtaaagaacttcaggccccagtgtatcgttctgaccggaggcccaatgactcgtcctgctctgcttgacatcacccacgcatttactaagaacagcggactgtgtatctgctgtgaggtgtttgttggaccacgtaagctctgtgtgaaggagatgaatagtggaatggccaaaaaacaggcttggctgatcaagaataagataaaggccttctacgctgctgtggctgctgactgcttccgcgatggagtgaggtctcttctgcaggccagtggcttgggtcgtatgaaacctaataccctggtcattggatataagaagaactggaggaaggctccattgacagagatcgaaaactatgtgggaatcattcacgacgccttcgatttcgagatcggagtcgtcattgtacgtattagccagggatttgatatttcccaggtcctgcaggtgcaggaggagctggagagacttgagcaggaaaggctcgctcttgaggccaccatcaaagacaatgaatgcgaggaggaatctggcggtattcgcggactcttcaagaaggccggtaagcttaacatcacaaaaaccacaccaaagaaggatggcagtatcaacacttcacaatccatgcatgtgggtgaatttaaccaaaaactcgtggaagcctctactcaatttaagaagaagcaggagaagggaactattgatgtgtggtggctgttcgacgatggtggtctgacattgctcatcccatacatccttaccctccgtaagaagtggaaagactgcaaattgagaatttacgtgggcggtaaaataaaccgcatcgaagaggaaaagattgttatggcttccctgctgtcaaagttcagaatcaagtttgcagacatacatataatcggtgatatcaatatacgtcctaataaggaaagttggaaggtcttcgaagaaatgatagagccttacaggttgcacgagtcatgcaaggacctcaccacagctgagaagctcaagagagagaccccctggaaaattaccgacgccgagttggaggctgtaaaagaaaagtcttaccgccaagtaaggttgaacgagcttctccaagagcattcaagggcagctaacttgattgtgctcagccttccagttgcccgtaagggcagcatctccgacctgctgtacatggcatggttggagatcttgaccaagaacttgccacccgtgttgctggttcgcggcaaccacaaaaatgtgctgactttttacagc

SEQ ID NO: 251087 - DNA, 3297 bp, synthetic construct
  misc_feature 1..3297: note = Description of Artificial Sequence: Synthetic coding sequence
  source 1..3297: mol_type = other DNA
atgagcttaaacaattcctccaatgtgtttctggacagcgtaccttctaataccaatcgtttccaagtaagcgtgataaacgaaaaccacgagtccagtgctgccgccgatgacaatacggacccacctcactacgaggaaacatctttcggcgatgaagctcagaaacgtctgcgcatctccttccggccgggaaaccaggaatgttacgacaacttcctgcagagtggagaaaccgccaagacagacgctagctttcatgcttatgattcacacaccaacacgtactatctgcagaccttcgggcacaatactatggacgcagtgcccaaaatcgagtactacagaaataccgggtcaattagtgggcctaaggttaaccgacccagccttcttgagatccacgagcagctagctaagaatgtggctgtgactccctctagcgcagatagagtggccaatggtgatggtatcccgggagacgagcaggcggaaaataaagaggacgaccaggcgggcgtggtcaaattcggctgggtgaagggcgtcttggtgaggtgtatgctcaatatctggggtgtgatgctctttattaggttgtcatggattgtcggcgaggccgggatcgggctgggggtgataataatcggattatccgttgtagtgactacgctgacgggaatcagcatgtctgctatatgcaccaatggggtggtgcgcggagggggagcttattatttaatatcccgcagcctggggcccgagttcgggggtagtatcggactgattttcgcattcgccaatgcagtagctgtggccatgtatgtggtgggattcgccgaaactgtagtggatctgttgaaggagtctgacagcatgatggtggaccccaccaatgatatccgaattatcggctccatcactgtcgttatactgctgggcatctccgtggccgggatggaatgggaagccaaggcccaggtaattttacttgttatcctactcattgcgattgctaatttcttcattggtactgttattcctagcaataacgaaaagaagtcccgcgggtttttcaattatcaagctagcatctttgctgaaaacttcggaccacggttcacaaaaggggagggcttttttagcgttttcgccatttttttcccggctgccacgggcattctagcaggagctaacatatctggggacctggaagatccgcaggatgcgattccaaggggcacaatgctggcaatctttattaccacagttgcatacttgggcgtagccatctgcgtgggggcgtgcgtggtgagggacgcaacaggaaacatgaatgacaccatcatttccggaatgaactgcaacgggtctgcagcatgcggactcggttacgatttctcacggtgccgccatgaaccttgtcagtacggtctgatgaacaattttcaggtaatgtccatggtgagcggctttggcccactgattacggcgggcatattttctgctaccctctcctccgccctcgcttcactggttagtgcacctaaggtcttccaggctctgtgcaaggacaacatttataaggcattgcaattcttcgccaaggggtacggaaagaataacgaaccgcttaggggctatattctaacctttctgatcgccatggcttttattttgatcgccgagctgaatactatcgctccgatcatctctaacttcttcctcgcatcctacgcattaataaacttcagctgctttcacgccagttacgccaagtcccccggttggcgtcccgcctatggcatatacaatatgtgggtgtccctgttcggcgccgttctgtgttgcgccgtaatgtttgtgataaattggtgggccgccgtgatcacgtacgtgatcgaattttttttgtacgtgtacgtgacttgtaagaaaccggacgttaattgggggagtagcacccaggccctgagttacgttagtgctctggacaacgctctcgagctaactaccgtggaagaccatgtcaagaatttccgtccccagtgcatcgttttgacaggtggaccaatgacgaggccagccctgcttgacatcactcatgctttcaccaagaactccggcctgtgtatttgctgtgaggtgttcgtgggcccaaggaagctgtgtgtgaaggaaatgaatagtgggatggcaaagaaacaagcgtggctaatcaaaaacaagatcaaggcattctatgccgcagttgctgctgattgcttccgagatggggtgcgaagcctccttcaagcaagtggccttggccggatgaaaccaaatactctggtgatcggatataagaagaattggaggaaagccccactgacggagattgaaaattacgtaggcattatacacgatgccttcgactttgaaattggggtagtgatagtccgtatctcccaggggtttgatatctcacaagttctacaggtgcaggaggaattagagcgactggaacaagagcgactggcactagaggccacgatcaaggataacgagtgcgaagaggagtccggtggtatacgaggcctattcaagaaagccggaaaactcaatattaccaagactactccaaaaaaggacgggtccatcaacacttcacagtccatgcacgttggggaattcaatcagaagcttgtcgaagcatctactcaatttaagaagaagcaggaaaaaggtaccattgacgtgtggtggctgttcgatgatggagggctgactctgctaataccgtatatactcaccctgaggaagaaatggaaagattgcaaactgagaatctacgtcgggggcaagattaaccggatagaggaagaaaagattgtgatggcgagcctgttgtcaaagttcaggataaaatttgcagatattcatataatcggagacatcaacatcaggccaaataaagaaagctggaaggtgttcgaggaaatgatagagccctaccgactgcatgaatcctgcaaagatcttacgaccgcagagaaactaaaaagagagaccccgtggaaaataacagacgccgagttggaagccgttaaagagaaatcttatcgccaggtgcgcctcaatgagcttctacaggagcatagtagagctgctaatctcatagtgctatccctccctgtggcaaggaaaggttctatatccgatctgctgtatatggcttggctggaaatcctcactaagaacttgccacctgtcttgttagttaggggcaaccataagaatgtactcaccttctacagt

SEQ ID NO: 251088 - DNA, 3297 bp, synthetic construct
  misc_feature 1..3297: note = Description of Artificial Sequence: Synthetic coding sequence
  source 1..3297: mol_type = other DNA
atgtccctgaacaattcaagcaacgtgtttctggacagcgtccctagcaacaccaatcgtttccaggtgtcagtgattaatgagaaccatgaatcatcagcagctgcagacgataacaccgatcctcctcattacgaggaaacttccttcggagatgaggcccagaaacgccttaggatatccttcaggccaggaaaccaagagtgctacgacaactttcttcaatccggtgagactgccaaaaccgacgcatcgttccacgcgtacgattcgcacactaatacgtactacctgcagacgtttgggcataacaccatggacgcagtgccaaagattgaatactaccgtaacaccggatccatttccggcccaaaggtcaacagaccttcacttctggaaatccacgaacagcttgcaaagaatgtcgcagtgactccatcatccgcggaccgggtcgcaaatggcgacggaattcccggtgatgagcaggcagagaacaaggaagatgaccaagcaggggtggtgaagtttggatgggtgaagggtgtgcttgtgaggtgtatgcttaacatttggggtgtgatgctgtttatacgcctgtcgtggattgtgggagaagctggtattggtcttggagtcattatcattggactgtccgttgttgtgaccaccctcactggtatttcgatgtcggcaatttgtactaacggggtcgtccggggtggaggggcctactacttgattagcaggtccctcggtcccgagtttggcggatcgatcggactcatttttgcattcgcgaacgctgtcgcagtggcaatgtacgtggtgggtttcgcagaaacggtcgtggacctccttaaggaatcggactcgatgatggtggatcctactaacgatattcgcataattggttcgattactgtggtgattctccttggtatttccgtggcaggaatggaatgggaagcaaaagcccaagtgattctcctggtgattctgttgatcgcgatagctaactttttcataggaactgttattccaagcaacaacgagaaaaagtcaagggggtttttcaactaccaggcatcgatctttgcagaaaactttggccccagattcaccaaaggtgaaggatttttcagcgtctttgccatcttcttccctgcagccactggcattctcgcaggagcgaacatctccggcgatcttgaagatcctcaagacgcaattcctcgcggcaccatgcttgcaattttcattactaccgtcgcatacctgggagtggcgatttgtgtgggagcctgcgtggtgagagatgcaactggaaacatgaacgacactatcatatcaggcatgaactgtaatggatccgccgcgtgcggactgggttacgatttctcccggtgtcgccacgagccatgtcagtacggtttgatgaataactttcaagtgatgtccatggtgagcggttttggccctcttattaccgcagggatcttttcagcaactctgagctcggccctggcatccctggtgagcgcccctaaggtattccaggccctgtgcaaggataacatctacaaggccctccagttttttgcaaaaggatacggaaagaataacgaaccactccgtggctacatcctgacgttcctgatcgcaatggcctttattcttatagccgaactgaacacgattgcgccaatcatctccaacttttttcttgcatcgtacgcattgatcaacttttcgtgctttcatgcctcctacgctaagagcccagggtggcgcccagcctacggcatatacaacatgtgggtgtcccttttcggggcagtcctttgttgtgccgtgatgttcgtgattaactggtgggcagcagtgattacttacgtaattgaattctttctgtacgtgtacgtcacttgcaaaaagcctgacgtgaattggggatcgtccactcaggcactcagctacgtgtctgcacttgataacgcacttgaactcaccaccgttgaagatcatgtcaagaacttccgacctcagtgtatcgtgctgactggcggacctatgacccgcccagcgctgcttgatattacccatgcttttaccaagaacagcggtttgtgtatatgctgtgaagtgtttgtgggtcctagaaagctgtgcgtgaaggaaatgaattcgggaatggcgaagaagcaggcctggctcatcaagaataagatcaaggcattttacgcagccgtggccgcagattgtttccgagatggagtgaggagcctcctgcaagcatcaggtctgggccgcatgaaacccaatactcttgtcattggctacaagaaaaactggcgaaaggcgccgcttactgagattgaaaactatgtgggtatcatacatgacgcatttgatttcgaaataggcgtggttattgtgcgcattagccagggctttgacatctcgcaggtgctgcaagtccaggaagagctggaacggcttgaacaagagcgtctggccctcgaggcaacgatcaaagacaacgaatgtgaggaagagtcgggcggcattagaggtctgttcaagaaggcaggaaagctgaacatcaccaaaactaccccgaaaaaagatggaagcattaacacctcgcagtcaatgcatgtgggagagttcaaccagaagctggtcgaggcatccacccagttcaagaagaagcaagagaaagggacgatcgatgtgtggtggctcttcgatgacggtggacttaccctgcttataccctacatactgactctccggaagaaatggaaggactgcaagctccgtatctacgtggggggaaagattaacaggattgaagaagaaaagattgtgatggcctcgcttctctcaaaattcaggatcaaatttgcagacatccatatcatcggcgacattaacattcgacccaacaaggaatcctggaaggtgttcgaagaaatgatagaaccatacagactgcatgaatcgtgtaaggatctgaccacggcggaaaagctgaagagagaaactccgtggaaaatcaccgatgctgagctcgaggcagtcaaagaaaagtcctaccggcaggtgcgcctgaacgaactccttcaggaacattccagagcggcaaacctgattgtcctgtcgctgcctgtggcacgaaaggggagcatttccgaccttctctacatggcatggttggagatccttaccaagaacttgcctccagtgcttcttgtccgtggcaaccataagaatgtgctgacgttctactca

SEQ ID NO: 251089 - DNA, 3297 bp, synthetic construct
  misc_feature 1..3297: note = Description of Artificial Sequence: Synthetic coding sequence
  source 1..3297: mol_type = other DNA
atgagcttgaacaattctagcaacgtgttcctcgattctgtaccctctaacacgaatagatttcaggtcagtgtgataaacgagaaccacgaaagcagtgcggcagcagatgacaataccgatccaccccactatgaggagaccagctttggtgatgaagcccagaaacgcttgcgcatttcttttcgtccgggcaatcaggaatgctatgataacttcctccaaagtggagagaccgctaaaactgacgctagcttccacgcctacgacagccatactaacacctactacctgcagacgtttggccataacacaatggatgccgtgcccaagatcgagtattatcgaaataccggatccatctctgggcccaaagttaaccggccctcacttcttgaaatacacgagcagctggctaagaacgtcgccgtgacaccctccagtgcagatcgcgtagccaacggagacggaattcctggagatgaacaggccgagaacaaggaggatgatcaggcaggtgtggtgaaatttggatgggtcaaaggggtgctggtccgctgtatgctaaatatctggggtgtgatgcttttcatcagattgagctggattgtcggggaggccgggattggcctcggagttattatcattgggctgtcggtggtggtgacaacgctgacgggcatctcaatgtctgcgatttgcactaacggtgtggtccgaggcggcggagcttattatctgataagtaggagccttggacccgagttcggtggctcaatcgggttgatctttgcattcgcaaacgccgtggctgtggccatgtatgtcgtcggcttcgccgagacggtggtagacctgctgaaagagtcggactccatgatggtggatcctactaacgatattaggataatcggatctatcacagtggtcatactgctcggaatatccgtggccggtatggaatgggaagcaaaagctcaggtcatcctgcttgtgattctcttgattgcgatcgccaatttctttatcggcaccgtaatcccatctaataacgaaaagaaatcgcgcggttttttcaattaccaggcgagtatatttgccgaaaactttgggccgcgtttcacgaaaggagaggggttcttttctgtgttcgcaatctttttccctgctgcgactggcatcctcgccggggcaaacatatccggggatttagaagatcctcaggacgccatacctagagggactatgctggccattttcatcacaactgttgcctacttgggagtcgccatctgtgtcggcgcttgcgttgtcagagatgccacggggaatatgaacgacacaatcatatccgggatgaactgtaatggtagtgctgcctgcggattggggtacgacttcagcagatgccgccatgagccgtgccagtatgggctgatgaacaactttcaagtaatgagtatggtgtctggatttggacccctaatcacggctggcatttttagcgccactctgagttcggccctggcctcattagtgagcgctcctaaagttttccaggccctctgtaaggataatatctacaaagcattgcagtttttcgcaaaggggtatggtaaaaataatgagcccctccgaggatatatcctgacgtttctgatcgccatggccttcattttaatagctgagctgaatactattgcgccgattatcagtaacttcttcctggcatcctacgccctcatcaacttcagctgcttccacgcttcatatgctaagtcccctggctggaggcccgcatacgggatttacaatatgtgggtatccctattcggggcagtgctctgttgtgcagtgatgtttgtcataaattggtgggccgcggtgatcacatacgtaatagaattttttttatacgtttacgtaacatgcaagaaacccgacgtgaattggggctctagtacccaggctctgagttacgtgtcggccctggataacgcgctcgaacttacaacggtcgaggaccacgtgaagaattttaggcctcagtgtattgtgctcacaggtggcccgatgacccgcccagccctgcttgacatcacacatgcgtttacaaagaattccggtctgtgcatctgttgtgaggtttttgtgggtcccagaaaattgtgcgtgaaggagatgaattccggaatggctaaaaagcaggcttggcttatcaagaacaaaatcaaagcattttatgcagccgtggcagccgactgctttagggatggggtcaggagcctattgcaggctagtggattgggcagaatgaagcccaatactctcgtcataggctacaaaaagaattggcgaaaggcaccactcaccgagattgaaaactacgtgggcataatacatgacgcgttcgacttcgagatcggagttgtgattgttaggatcagccagggtttcgacatcagccaggtactgcaggtccaggaggaacttgaacggttagaacaggagagattagcgctggaggctaccattaaggataacgagtgtgaagaagagtccggaggtatacgcgggcttttcaaaaaagcaggcaagctaaacattaccaagaccacccctaagaaagacggaagcattaatacatcccagtctatgcacgttggcgagttcaaccagaaattagtggaagcctctacacagttcaagaaaaagcaggaaaaggggactatcgatgtctggtggctgtttgatgacggcggacttactctgctgattccttatatactgacgctgcggaaaaagtggaaggactgcaaattgaggatttacgtaggtggaaagatcaacagaatagaggaagaaaagatcgtaatggcctcattgctgtctaagtttaggataaagttcgctgacatccatattataggagacattaacattcgcccgaataaggaaagttggaaagtttttgaagaaatgattgagccctacaggctacatgagtcttgcaaggacctcacaacagcagagaagctgaagagggaaactccatggaaaatcaccgacgccgaactggaggcggtgaaagagaagagttaccgccaggtgcgcctaaacgaactgctgcaggaacattcccgtgccgctaacctgatcgtcctcagtctgccagtggcacggaaagggtcaattagtgacctgttatacatggcgtggctcgagattctgaccaaaaatctgcctccagtgttgctagtgaggggcaatcataaaaacgtcctcacattttattcg

SEQ ID NO: 251090 - DNA, 3297 bp, synthetic construct
  misc_feature 1..3297: note = Description of Artificial Sequence: Synthetic coding sequence
  source 1..3297: mol_type = other DNA
atgtccttgaacaacagctcaaatgtcttcctcgactctgttccaagcaatactaacaggtttcaggttagcgtaatcaacgagaatcatgaatctagcgcggctgccgatgataacacggatcctccacattacgaggaaacaagtttcggcgacgaagcccaaaagcgattacgtatctcattcaggcccgggaaccaggagtgctatgataatttcctgcagagcggtgaaactgccaagaccgatgcctccttccatgcctatgattcccacaccaatacctactatttgcagacgttcggccataatacaatggatgctgtcccgaagatcgaatattatagaaacactgggtcaatcagcggtccaaaagttaaccgaccttctttactcgagatccacgaacaactagcaaagaacgtcgctgtaaccccttcttcagccgaccgcgtcgctaatggcgatggaattccaggggatgagcaagccgagaacaaggaagacgatcaggccggggtcgtgaaattcgggtgggtgaagggagtgttagtacgatgcatgttgaatatatggggagtcatgctcttcatcaggctgagctggatcgtaggtgaagctggcattggtcttggcgtgatcattattgggctctccgtagtcgttaccaccctcacagggatcagcatgagtgctatctgcacaaatggcgtagtgcgcggagggggtgcttattatttaatctctcgtagcctgggacctgaatttgggggctccatcggactaattttcgcatttgccaacgctgtagcagtggccatgtacgtggtcggattcgctgaaaccgtggttgacttgctgaaagagtcagattccatgatggtcgatccaactaatgacattagaataataggtagtatcaccgttgtgattctgcttggcatctcagtagcaggcatggagtgggaggccaaggcacaggtcattttgctggtgatcctactcatcgccatcgctaacttcttcataggaactgtgattcctagcaacaacgagaaaaaatctcgcgggttctttaactaccaagcgtctatctttgccgagaacttcggccccaggttcacaaaaggggagggcttttttagcgtctttgccatatttttccccgctgctactgggatcctcgctggtgccaatatatcaggggatttggaggatccgcaggacgccatacctagagggactatgttggccatattcattaccacagttgcttatttaggcgtcgccatctgtgtcggggcttgcgtagtgcgtgacgctaccgggaatatgaacgacactatcatctcaggtatgaattgtaatggttccgccgcttgtggtctcggatacgatttcagcaggtgccggcatgaaccgtgccaatacggcctgatgaataactttcaggtgatgtccatggtgtccggattcggtccattaataaccgctggtattttctcagccactcttagttcagccttagcaagcttagtaagtgccccaaaggtcttccaggcactttgtaaggataatatttataaggcactccagtttttcgccaagggctacgggaagaacaacgaaccgctgcgggggtatatcctgacgttcctcatcgccatggccttcatccttattgcagagctgaacaccattgccccgataatttctaacttcttcctggcctcctacgcgttgatcaacttttcatgtttccacgccagttatgccaaatcccctggttggagaccagcttacggcatttacaatatgtgggtctcactgtttggagcagttctgtgctgtgcggtcatgttcgtgataaattggtgggcagctgtgatcacttatgtcatcgaatttttcctgtacgtgtacgtgacatgcaagaaacccgacgtgaattggggctcctctactcaggctctctcctatgtcagtgcccttgataacgcccttgagttaactactgtggaggatcatgtgaagaatttccggccacagtgtatcgtactaacgggtggaccaatgacccggcccgccctcctcgacattactcacgctttcaccaagaacagcggtctgtgtatctgctgtgaggtgttcgtggggcctcgcaagctgtgcgtgaaggagatgaacagcggtatggctaaaaagcaagcttggcttatcaaaaacaagatcaaagccttctatgccgccgtggccgccgactgttttagagatggtgtccggtctctccttcaggcgagtgggctgggtcggatgaaacccaacactttggtgatcggttataagaagaattggcggaaggctcctctaactgaaatcgagaactatgtcggcataattcacgatgccttcgattttgagatcggggtcgtcatcgtgaggatcagtcagggctttgacatatcacaagtactgcaggtccaagaggagctggagcggcttgaacaggagcgtctcgccctcgaggccaccatcaaagacaacgagtgcgaagaagagagcggaggcatacggggactgttcaagaaggccggcaagttaaacatcaccaagacaacgcctaaaaaggacggctcgattaacacctcccagagtatgcatgttggcgaatttaaccagaagttagtggaggcaagtacccaatttaagaagaagcaggagaaaggcactattgacgtgtggtggctgtttgacgatgggggactcaccctgctgattccttatattttaacccttcgcaagaagtggaaggattgcaagctgcggatatacgtgggaggaaagattaataggattgaggaggaaaaaatagtgatggctagtctgttgagtaaatttcgaatcaagttcgctgatatccacatcattggtgatataaacatccggcccaacaaagaaagctggaaggtctttgaagagatgattgaaccgtatcggctgcacgagtcgtgcaaggacttgaccacagccgagaaactgaagagggaaaccccttggaagattaccgatgccgagctcgaggcagtaaaggagaaatcatatcggcaagtccgattgaatgagctcctccaggaacacagtagggccgccaatttaatcgtgttatctcttcccgtcgcgcgaaaaggtagcatttcagatttgctgtacatggcttggctggagatactgacgaagaacttgccacctgtgttgcttgtgcgtggcaaccataagaacgttcttacattttacagc

SEQ ID NO: 251091 - DNA, 3297 bp, synthetic construct
  misc_feature 1..3297: note = Description of Artificial Sequence: Synthetic coding sequence
  source 1..3297: mol_type = other DNA
atgtcacttaacaacagctcgaatgtgtttctggacagcgtgccttccaacaccaatagattccaagtgtcggtcatcaacgaaaaccatgaatccagcgcagccgcagacgataatactgatcctccccattatgaggaaacctcctttggagatgaagcacagaaacgtctgcgcatatccttcagaccaggtaaccaagaatgttacgataactttctgcagtcaggggaaactgcgaaaaccgacgcctcattccatgcatacgattcccataccaacacctactacctgcaaacctttggtcataatacgatggatgccgtgcctaagatcgagtactaccgcaataccggctccatttccggaccaaaggtgaacaggcctagccttctggaaattcatgagcaacttgcaaagaatgtcgcggtgactccatcgtctgcagatcgcgtggcgaatggtgatggaatcccaggtgatgaacaagccgagaataaagaagatgatcaggcaggagtggtgaagtttggttgggtgaagggcgtgctcgtcaggtgtatgctgaacatctggggtgtgatgctgtttattcgcctctcatggattgtgggagaagccggcatcggcttgggagtcattatcatcggactgtccgtcgtggtcactaccctcactggaatatcgatgtccgccatttgtactaacggtgtggtgaggggtggaggtgcatactatcttatctccagaagcctgggtccagaatttggcggctcgattggcctcatttttgcatttgcgaacgcagtggcagtggcaatgtacgtggtgggattcgccgagactgtcgtcgatttgcttaaggaatcggattccatgatggtggatcccactaacgacatacggattattgggtcgatcactgtggtgatcctgttgggtatcagcgtggcaggaatggagtgggaggccaaggcacaggtcatcctgcttgtcattctgcttattgctattgccaatttctttatcgggactgtcataccttcgaacaatgaaaagaaatcgagaggattctttaactaccaggcatccatctttgcagaaaacttcggaccgcgtttcaccaagggcgagggctttttctccgtctttgcgattttcttcccagcagctaccgggatcctcgccggcgcgaacatttcgggagatctggaggatccccaggatgcaattcctcgcggaactatgctcgccatattcatcacgaccgtcgcataccttggcgtcgcaatctgtgtgggggcttgcgtcgtgcgcgacgcaaccggcaacatgaacgatactatcatttcaggtatgaactgtaacggttccgcggcgtgtggtctggggtacgattttagcaggtgtagacatgagccgtgtcagtacggtctgatgaacaatttccaagtgatgtcgatggtgtcaggatttggccctctgattaccgccggaatcttcagtgcaactctctcgagcgcactggcaagcctggtgtcagcacccaaagtgtttcaggcactttgtaaggataacatttacaaagccctgcagttttttgcaaagggatacgggaaaaacaacgaacctcttcgaggttacatcctgacctttcttatcgctatggcattcattcttatcgccgaacttaacacgattgccccgattatctcgaacttcttccttgcgtcttacgctttgattaacttcagctgcttccatgctagctacgccaaatccccgggatggcgacctgcctacggtatttacaatatgtgggtcagcctcttcggcgcagtcttgtgttgcgcggtgatgtttgtcattaactggtgggcagcagtgatcacttacgtcattgagtttttcctttacgtctacgtcacttgtaaaaagcctgacgtgaattggggatcatcgacccaagctctgagttacgtctcagcactggacaatgccctggagctgactactgtggaagatcacgtgaagaactttcgcccacagtgcatcgtcctgactggtggaccaatgaccaggcctgcacttcttgacatcacgcatgccttcactaaaaacagcggactctgtatttgctgcgaggtgtttgtcggtccacggaaactgtgtgtgaaggagatgaactcaggaatggccaagaaacaggcttggcttatcaagaacaagataaaagcgttctatgcagcagtggctgcagattgttttcgcgatggagtccggagcctgctgcaagcatccggtttggggagaatgaaacccaatacccttgttattggctacaagaagaattggaggaaggccccacttaccgaaatagaaaactacgtgggaatcatacacgatgcatttgactttgagattggcgtcgtgattgtgagaatcagccaaggttttgacatctcccaggtgcttcaagtgcaggaagagctggaaaggctggaacaagaaaggctggcgcttgaagctaccatcaaagacaatgagtgtgaggaggaatcgggagggattcggggactgttcaaaaaggcaggaaagctgaacatcaccaagactacgccaaaaaaggacgggtccatcaatacgtcccaaagtatgcacgtgggggaattcaaccaaaagctcgtggaagcatctactcagttcaagaagaaacaagagaaaggtactattgacgtgtggtggctctttgacgatggcggtcttactcttcttattccttacattcttactctccggaagaagtggaaagattgtaagctgaggatttacgtcggtggtaaaatcaaccgaattgaggaagaaaagattgtgatggcctcgttgctttcgaagtttagaataaagttcgcagatattcatatcattggtgatatcaatatccggcctaacaaggagtcgtggaaggtctttgaagagatgattgagccttacaggttgcacgaatcgtgcaaagatctgaccaccgccgagaagctgaagcgtgagactccttggaagattaccgatgcagaacttgaggcagtgaaggaaaagtcgtacagacaagtgagacttaacgagctgcttcaagagcactcgcgggctgccaatcttatcgtgcttagcctccctgtggccaggaagggatcgattagcgatctgctgtacatggcgtggctggagattctcaccaagaatctgccccctgtgctgctcgtccgggggaaccacaagaatgtgctgaccttttactcc

SEQ ID NO: 251092 - DNA, 3297 bp, synthetic construct
  misc_feature 1..3297: note = Description of Artificial Sequence: Synthetic coding sequence
  source 1..3297: mol_type = other DNA
atgagcctcaacaattcaagcaacgttttcctggattcggttccctcgaacactaaccgtttccaagtgtccgtgatcaatgagaaccacgagagcagcgctgccgccgacgacaacactgaccctccacattacgaggagactagcttcggcgacgaagcccaaaagcggctccggatctcgtttcggccaggaaaccaagaatgctacgacaactttctgcaatctggagagactgcaaagaccgacgcctcttttcacgcctacgattcgcataccaacacctactaccttcagacctttggacataatactatggacgctgtgccgaagattgaatactaccgcaacaccggatccatcagcggaccaaaggtgaatcgaccgtcactgctggagatccacgagcagctggctaaaaacgtggctgtgactccctcttcagccgatcgcgtggctaatggagatggcattccgggcgacgaacaggcggaaaacaaggaggacgatcaggccggggtggtgaagttcggatgggtcaagggagtgctggtgcgctgcatgttgaacatctggggcgtcatgctgttcatcaggctgagctggatcgtgggagaggctggaatcggactgggagtcatcatcatcggactgtcggtcgtggtcaccacgttgacgggcatctcgatgtccgccatctgcactaatggtgtggtgagagggggcggagcctactacctgatctcccggagcctgggacctgaatttggagggtcgattggtctgatctttgccttcgccaatgcggtcgcggtggccatgtacgtggtgggatttgccgagactgtggttgaccttctgaaggagagcgactccatgatggttgacccgactaacgacattagaattatcggatcgataaccgtcgtcatcctgcttggaatctcggtggctggtatggagtgggaggccaaggcccaggtgattctcctcgtcatccttctgattgcaatcgccaacttcttcatcggtaccgtgatcccttccaacaacgaaaagaaatcacgaggattctttaactatcaggcatcaatcttcgcggaaaacttcggcccaagatttaccaaaggagaagggttcttctctgtctttgcaatctttttccctgcggctactggcatcctggcgggcgcaaacatctccggggaccttgaggacccccaagacgcaatcccccggggaactatgctggcgattttcatcactacggtggcgtacctgggcgttgccatttgtgtcggagcgtgtgtcgtgcgcgatgcgaccggaaacatgaatgacaccatcatctccggtatgaattgcaacggctcggctgcgtgcggactgggatacgatttttcgagatgtcgccatgaaccttgtcagtacggccttatgaacaacttccaagtgatgtcaatggtgtccggcttcggaccgctcatcaccgccggaatcttcagcgcgactctgtcgtcagccttggccagcctcgtgtccgcgccaaaagtgtttcaggccttgtgtaaagataacatctacaaggcgttgcaattcttcgccaagggatacgggaaaaacaatgagccactccgtggctacatcctgaccttcctcattgctatggcgtttatcttgatcgctgaactcaacaccatcgccccgataatcagcaactttttcctcgcgagctacgctctgatcaatttctcctgcttccacgcttcgtacgccaagagcccaggttggcgtccggcctacgggatttacaatatgtgggtgtctctgttcggggcggtcttgtgctgcgcggtgatgttcgtgattaactggtgggcagctgtcatcacctacgttatcgaattcttcctgtatgtctatgtcacttgcaagaaaccggatgtcaactggggatcgagcacgcaagcattgtcctacgtgtccgcacttgacaatgctctggaactcactaccgtggaagatcatgtgaagaactttcgcccgcagtgcatagtgctgactggggggcccatgacccggccggccctgctcgatattactcatgccttcaccaagaactcgggcctgtgtatctgttgcgaagtgttcgtgggaccaaggaagctctgcgtgaaagagatgaattcggggatggcaaagaaacaagcatggctcatcaagaataagatcaaggcattttacgcagcagtggccgcagattgcttccgggacggagtgcgctccctgctgcaggccagcggactgggacgcatgaagcccaacacgctggtgatcggttacaaaaagaactggagaaaggcaccgctgacggagatcgagaactacgtgggaatcatacacgacgccttcgacttcgaaatcggagtggtgatcgtcaggataagccagggtttcgacatatctcaggtgctgcaggtccaggaagagcttgaacggcttgagcaggaacggcttgccttggaggcgaccatcaaggacaatgagtgcgaagaagaatcaggtggtattagaggcctgttcaagaaggcaggtaagctgaatatcaccaagaccacgcctaagaaagacggctcaattaacaccagccagtccatgcacgtgggcgagttcaatcagaagctggtcgaggcgtcgacccaattcaaaaagaaacaggaaaagggaacgatcgatgtctggtggcttttcgatgatggcggactcactcttttgatcccatacatcctgactctccggaaaaagtggaaagactgcaagctgcggatttatgttggcgggaagatcaaccggatcgaagaggaaaagatcgtgatggcgtcgctcctctcgaaattccggatcaaattcgccgacatccacatcatcggggacatcaatatcagacctaacaaggaatcgtggaaggtctttgaagaaatgattgaaccataccgcctgcatgaatcatgcaaagacctgaccaccgcggaaaaactcaaacgagaaactccgtggaaaatcactgatgccgaactcgaagcagtgaaggagaaatcctaccgccaagtgcgcctgaatgagctgcttcaggagcactcccgggccgcaaatctgatcgtgctcagcctgccagtcgcgcgcaagggatccatctcggatctgctgtatatggcctggcttgaaatcctcaccaagaatctgccgccggtgcttctcgtgaggggtaaccataagaatgtcctgactttctactcc

SEQ ID NO: 251093 - DNA, 3297 bp, synthetic construct
  misc_feature 1..3297: note = Description of Artificial Sequence: Synthetic coding sequence
  source 1..3297: mol_type = other DNA
atgtccctgaataactcctcaaacgtctttcttgacagcgtgccatccaacacgaaccggttccaagtgtccgtgattaacgaaaaccatgagtcgtcggcggcagccgatgataataccgacccgcctcattacgaggaaacctcttttggcgatgaagctcaaaagagactccgaattagcttccggcctggaaaccaagagtgctacgataacttcctgcaaagcggagaaactgccaagacggatgcatcatttcatgcatatgactcacatacgaatacctactacctccaaacctttggacacaataccatggacgcggtgcctaagattgaatactaccgcaataccgggtcaatctccggtcccaaggtcaacagaccatccctgctggaaatccacgagcagcttgcaaagaacgtcgccgtcaccccgtcctccgcagatcgggttgcaaacggagacggaattcctggcgatgaacaagccgagaacaaggaagatgaccaagcaggagttgtgaagtttggatgggtgaagggagtgcttgtgcgatgtatgctgaatatctggggagtcatgcttttcatacgcctctcgtggattgtgggggaagcagggattggactgggtgtgatcattatcggactgtcggtggtggtgaccactcttactggaatctccatgtcagcaatttgtaccaatggagtcgtgaggggtggtggggcgtactacctgatttcgcggtcgctggggcctgaattcggggggtcaattggactcattttcgccttcgccaacgctgtggccgtcgcaatgtacgtggtcggatttgcagaaacggtggtggacctgctcaaggagtcggattcgatgatggtcgaccccaccaacgatattcgcatcatcggttcgattacggtggtgatcctgcttggaatttcagtcgcaggaatggagtgggaagccaaggcacaggtcatccttctcgtcatcctgctgatcgcaatagcaaatttcttcattggtaccgtgatcccgtcgaataacgaaaagaagtcacgtgggtttttcaattaccaagcaagcatctttgcagaaaactttggacctcgctttaccaaaggagaaggatttttctccgtgtttgcaatctttttcccagcggcgaccggcatccttgctggtgcgaatatctccggtgacctggaggacccccaagatgcaatcccacgcggtaccatgctggcaatattcattactaccgtcgcatacctcggcgtggcaatctgtgtgggtgcctgtgtggtgagagatgccactggcaacatgaatgataccattatctcgggtatgaactgtaatgggtcagccgcctgcggtctgggatacgatttttcgaggtgccgacacgaaccatgtcagtatggactgatgaataactttcaggtcatgtcgatggtgtccggcttcggtccactgattaccgcaggcatcttttccgcaaccctctcctccgcacttgcatcgcttgtatctgcgcctaaggtctttcaagccctttgtaaggacaatatctataaggcactccagttttttgcaaagggatacggcaagaacaacgagcctctgcgcggatacatcctgacctttcttatcgccatggcatttatccttatcgcagagcttaataccattgcacctatcatttcaaatttctttttggcaagctacgcgctcataaactttagctgttttcatgcctcctacgcaaaaagccctggttggcgtcccgcatatggtatctacaacatgtgggtgtcgcttttcggagccgtcctgtgttgtgcagtcatgttcgtcataaactggtgggccgcggtgataacctatgtgattgaattctttctgtacgtctacgtgacttgtaaaaagcctgatgtcaactggggctcgagcacccaggccctctcctacgtgtctgcactggataacgcgctcgagctcactactgtggaagatcatgtcaagaattttcgacctcaatgtatagtgctcaccggtggaccgatgactcgcccagcactgcttgacattacgcacgccttcactaagaattcgggactctgtatatgttgtgaggtgttcgtgggtccccggaaactttgtgtgaaggaaatgaacagcggtatggccaagaaacaggcatggctgatcaagaacaaaatcaaggcattctacgcagcagtggcagcagattgtttcagggacggggtgcgtagccttctgcaagcatcggggctggggcgtatgaagcctaataccctcgttattggatacaagaaaaactggcgaaaggcccctctgaccgagattgaaaactacgtgggtatcattcacgatgcatttgattttgaaattggagtggtcattgttcggataagccagggatttgatatatcgcaggtgctgcaagtacaggaggaacttgagagattggaacaagaaagactcgctctggaagctacgattaaagataacgaatgtgaagaggagagcggtggaattcgaggactgtttaagaaagcaggaaagctcaacataaccaagactaccccgaaaaaggacggttcaattaacacttcacagtcgatgcatgtcggcgagtttaaccagaagctcgtcgaggcttcaacgcagttcaagaagaaacaagagaaaggcactatagatgtgtggtggctcttcgacgacggtggactgactctcttgattccatacatactgacgcttcgaaagaagtggaaggattgtaagttgcgtatttacgtgggaggtaagattaaccggattgaagaagagaaaattgtgatggcttccctgctgtccaagtttcgcattaagttcgcagatattcacattattggagatatcaacataaggccgaataaggaaagctggaaagtgtttgaggaaatgatcgaaccctaccggctccacgaaagctgcaaggatcttaccaccgcagaaaagctcaaacgtgaaaccccttggaagattaccgatgcagaactggaggcggtgaaggaaaagtcgtaccggcaagtgagactgaatgaacttcttcaggagcattcgagggcagcgaaccttattgtgctttcgctgccagtggcaaggaagggtagcatttcggacctgctgtacatggcatggttggaaattctcaccaagaatcttccaccagtcctgttggtgcgcgggaatcataagaatgttcttaccttttactcg

SEQ ID NO: 251094 - DNA, 3297 bp, synthetic construct
  misc_feature 1..3297: note = Description of Artificial Sequence: Synthetic coding sequence
  source 1..3297: mol_type = other DNA
atgtcccttaataattccagcaacgtgttcctagactcagtccccagcaatacaaatagatttcaagtgagtgtgattaatgaaaatcatgagtccagtgccgctgcggatgacaataccgatcccccccactacgaagaaacatcctttggggatgaagctcagaagcgactgcgtatcagttttcggcccggtaatcaggagtgttacgacaacttcctccagtcaggtgagacagccaagacggatgcatcatttcacgcttacgacagccatacaaatacatattatctccaaactttcggccacaacactatggatgctgtgcctaagattgagtactacaggaatactggaagcatttccggacccaaggtcaatcgaccatctttgttggagattcatgagcagctggcgaagaacgtagcggtgacacctagttccgcagaccgagtcgcgaacggagatggaatccctggcgacgagcaggctgagaacaaggaagacgatcaggccggtgttgtgaagtttggatgggtaaagggcgtgctcgtccgctgtatgctgaatatttggggcgtcatgctgtttatccgcctatcctggatcgtgggtgaggcgggaattggccttggagtgatcattattggactgtctgtagttgtgacaactttaacaggtataagtatgtccgctatatgtacaaacggtgtcgtaaggggaggtggtgcttactatctgatctcacgatctctcggacccgagttcgggggtagcatcggcctaatttttgcttttgctaacgcagttgcagtggccatgtatgtggtgggattcgcggagacggtggtggacttactcaaggagagtgacagtatgatggtggatcctaccaacgacattcggattattggctccattactgtggtgatcctgttggggatatcagttgcaggaatggagtgggaagccaaggctcaggtaattcttctcgttattctgttgattgccatagccaattttttcatcggcaccgtcatcccatcgaacaacgagaagaagtctcgaggatttttcaattatcaagcctctatttttgccgagaatttcggaccccggtttacaaaaggggaaggatttttttctgtgttcgctatcttttttcccgcagcaactggtatcttagcaggagctaatatatctggagatttggaggaccctcaggatgcaatcccacgtggcacaatgctcgctatcttcatcacaaccgtggcttaccttggcgttgccatctgtgtgggcgcctgcgtggtgagagacgcaactggaaatatgaacgacacaataatttcgggtatgaattgcaatgggtccgctgcctgtggtttgggttacgacttttcacgctgccggcacgaaccgtgtcagtacggccttatgaacaacttccaggtgatgtctatggtctcaggcttcggcccactgatcacggctggaatcttttcagcaaccctgtcctccgctctcgcaagtttggtttccgctccgaaggtgttccaggcgctttgtaaagataatatctataaagctctacagttcttcgctaagggatacgggaaaaataatgagccattacgcgggtatatcctcacctttctgatagcaatggcatttattctcatagccgagctgaatacgatagccccaataatcagtaacttttttctggcaagctacgcactcattaattttagctgtttccacgcctcctacgcgaaaagccctgggtggcgcccggcctacggaatttacaatatgtgggtgtctctgttcggggccgtgctgtgctgcgcggtcatgttcgtcattaactggtgggcagctgtcataacctatgtaatcgaattctttctgtacgtttacgtaacatgtaagaaaccagatgtgaactggggatcctccacacaggctttgagttacgtttctgctctggataatgccctggagcttactactgtcgaagaccacgttaagaatttcaggccccagtgcattgtcctgaccggaggacccatgacccggcctgccctactagacatcacacatgcctttaccaaaaattcaggcctatgcatatgttgcgaagtgttcgtggggcctagaaaactctgcgttaaagagatgaattccggcatggctaagaaacaggcctggctcatcaagaacaagatcaaagcgttctacgcggctgtagccgcggactgttttcgggatggagtgcgatccctcctccaagctagtggactggggaggatgaaacctaacactttggtgattggctataaaaagaattggagaaaggctcccctgacagagatcgaaaattacgtcgggattattcatgatgcatttgactttgagataggagttgtgatcgtgcgaatatcccagggcttcgacatctctcaagtgctccaggtgcaggaggagctcgaacggcttgagcaggaaagattggccctggaggctactatcaaggacaacgagtgcgaggaggagagtggcgggataagaggtctgtttaagaaagcaggtaagcttaacatcaccaagacaactcctaaaaaggatgggtcaatcaatactagtcagtctatgcatgtgggggaatttaaccaaaagctggtggaagctagtactcagttcaagaagaagcaggagaaggggacaattgacgtatggtggctcttcgatgacggagggctgactctcctgatcccgtacatactcactttgcgcaagaaatggaaggactgtaaattgcgtatctacgttggcggaaaaatcaaccgcattgaggaagagaaaatcgttatggctagcttactgagcaaattccggattaagttcgctgacatccacatcatcggtgatataaatatcagacccaacaaagagtcctggaaggtgtttgaagaaatgattgagccttaccggctgcatgaatcttgtaaggatctgacgacagctgagaaactgaagagagagactccttggaaaataacggacgctgagctggaggccgtgaaggagaaaagctaccgccaggtccggctcaatgaactcctacaggagcactcgcgggccgctaacctgatcgtgctctctttacctgttgcgcggaagggcagtatctctgacctcctctacatggcctggttggagattctgaccaaaaaccttcctcctgtgctattggtcagggggaaccacaaaaatgtcctcaccttctattct

SEQ ID NO: 251095 - DNA, 3297 bp, synthetic construct
  misc_feature 1..3297: note = Description of Artificial Sequence: Synthetic coding sequence
  source 1..3297: mol_type = other DNA
atgagtctgaataacagctctaacgtgtttctggacagcgtgccaagtaacacaaatcgtttccaggtcagcgtgatcaatgaaaatcatgagagttcagccgctgctgacgacaacactgaccctccccactacgaggaaacatctttcggagacgaagctcagaagcggttgcgtatttcatttcgtcctggcaatcaagagtgttacgacaacttcttacagtccggagaaacagcaaagaccgatgcatctttccacgcctacgacagccacaccaacacctactatcttcagacatttgggcataacaccatggacgctgtgcctaaaatcgagtactacagaaacaccgggagcatttctggacccaaggtgaacaggcccagtctgttagagattcatgagcagttggcaaaaaatgtagctgtgactccatcaagcgccgaccgcgtcgccaatggcgatggaatacccggtgacgagcaagcagaaaacaaggaagacgaccaagctggggtggtcaagtttggctgggtaaaaggtgtgctagtccggtgtatgctgaatatatggggcgtcatgctgtttatccggttatcttggatagttggtgaagctggaatcggcctaggcgtgatcattattggtctgagcgtggtggtgactacattaactggaatctctatgagcgctatctgtaccaacggggtggtgcgtggcggtggagcctactacctgatatccagatcattggggcctgagtttggcggcagtatcggacttatattcgcattcgcaaacgcagttgcagtggccatgtatgttgtgggctttgctgaaaccgttgtggatctgttgaaagagtctgactcaatgatggttgacccaaccaatgatatccgtataatcggaagcatcactgtcgttatactgctaggcatttcagttgctgggatggagtgggaggctaaggcccaggttatcctcttagtaatactgctgatcgctattgccaacttcttcatcggcactgtgattcctagtaacaacgaaaaaaagagtagaggttttttcaactatcaggcttccatatttgctgaaaatttcgggccacggttcaccaagggcgaaggtttcttctcagttttcgctatattcttccctgccgctaccggcatcctggcaggagccaacatatctggagatctagaggatccccaggacgcaattcctcgcggtacaatgctggccatattcataactacagtcgcctatctgggcgttgcaatttgcgtgggcgcttgcgtcgtgagagatgccactggcaacatgaatgacaccataatttctggcatgaactgcaatgggagcgctgcctgcggactgggctacgatttcagccgctgtaggcatgaaccgtgccaatacggtctgatgaacaatttccaggttatgtccatggtttctggctttggccccctgataacagccggcatattctcagcaaccttatcttctgctctggcttctctggtatcagccccaaaagtgttccaggctctctgtaaagacaatatatacaaggccttacagtttttcgctaagggctatggcaagaataatgaacctttacgtggatacatcctgaccttccttatagccatggcttttatactcatagccgagctaaacaccatcgccccgataattagtaatttctttctagcctcttatgctctgatcaacttttcctgctttcatgcctcctacgcaaaatccccagggtggagacccgcttatggcatctacaatatgtgggtgtccctgttcggagctgtgttatgctgtgccgttatgtttgtgattaattggtgggccgccgtcatcacttatgtgattgaatttttcctgtatgtgtacgtgacttgcaaaaagcccgacgttaattgggggagctccactcaagccctatcttatgtgagcgccctcgataatgctctggaactgacaactgtggaggatcatgtgaaaaactttaggccacagtgcatagtcctcacaggcggcccaatgacacggccagctctgcttgatataacccacgcttttaccaagaacagtggactgtgcatatgttgcgaagtgttcgtgggaccccgcaaactatgtgtgaaggaaatgaactccggcatggccaaaaagcaagcatggttaatcaaaaataaaatcaaggccttttacgcagccgtagctgctgactgctttcgggacggcgttcggagtctgctacaggcctctggactgggtcgcatgaaacctaacactctggtgattggttataagaagaactggcggaaggctcctttaactgagatcgagaactatgttggtattatacatgacgcattcgattttgagataggtgtggttatcgtacggatttcacagggttttgacatctcccaggtgctgcaggtgcaggaagaattggagaggctggagcaggagcgactggccctggaggcaacaatcaaggacaatgagtgtgaagaagagtccggcggaatccgcggtctttttaagaaagccggaaagctgaatataaccaaaaccactccaaagaaggacggctcaataaacacctcacagagcatgcatgttggcgaattcaatcagaagttggtagaggcttcaacccaattcaagaagaagcaggaaaagggtactatagacgtttggtggctcttcgacgacggcggtttaaccctgttaatcccatacatattaactctgcgcaagaaatggaaggattgtaaattgcgaatctacgttggtggcaagatcaaccgaatcgaggaggagaaaatcgtcatggcttcattactgagtaagtttcggatcaaatttgccgatattcacatcataggagacatcaatatcaggcctaacaaagaatcctggaaagtgtttgaagagatgattgagccatacaggctccacgagtcttgcaaagacctgacaaccgcagaaaaactgaagcgggaaaccccttggaagataaccgatgccgagttagaggctgttaaagaaaaaagctatcgacaagtccggttaaacgagctgctccaggaacattccagggccgctaacttaatcgtgctcagcctcccagtcgccagaaagggctcaatcagtgacctgctctacatggcctggctggagattctaaccaaaaacttacccccagtgctgctggtccggggtaaccacaagaacgttctgacattctattct

SEQ ID NO: 251096 - DNA, 3297 bp, synthetic construct
  misc_feature 1..3297: note = Description of Artificial Sequence: Synthetic coding sequence
  source 1..3297: mol_type = other DNA
atgtcgctgaacaattcttcgaacgtgttcctggacagcgtcccatcgaataccaataggttccaagtgtcggtaatcaacgaaaaccatgagtcaagcgccgccgctgacgacaataccgatccaccgcattacgaagaaacctctttcggggacgaggcccagaaacggctgagaatctcgtttcggccaggaaaccaggaatgctacgacaatttcttgcagtctggagaaacggccaagaccgacgctagcttccatgcttacgattcgcacactaacacctactatctccagacgtttggacataacaccatggacgccgtgccaaaaatcgagtactaccgcaacactggctcaattagcggaccgaaggtgaacaggccgtcgctgctggaaatccacgagcaactggcgaagaacgtggcggtcacgccctcctcagccgaccgggtggccaacggggatggtatccctggagacgaacaagctgaaaacaaagaggatgatcaggcaggggtggtgaagttcggatgggtgaaaggagttctcgtcaggtgtatgctgaacatctggggcgtgatgctcttcatccggctgtcgtggatcgtgggagaggccggaatcgggctcggggtgatcattatcgggctcagcgtggtggtcactacgttgacgggcatctcgatgtctgcgatctgcacgaacggagtggtgcgcggagggggtgcgtattacctgattagcaggtccctgggcccggaatttggagggtcgatcgggctcatctttgccttcgcgaatgcggtcgccgtcgcaatgtacgtggtggggttcgcagagactgtggtggacctgctgaaggagtccgactcgatgatggtcgatccgactaatgacatccgcatcatcggatcaatcactgtggtgatcttgctgggcatctcggtcgccggaatggaatgggaggcaaaggcccaggtcatcctgctcgtgatcctgttgatcgctatcgcaaatttcttcattggaaccgtcatcccctccaacaacgaaaagaagtcaagaggcttctttaactaccaggcgtccatcttcgccgagaatttcggaccaagattcacgaagggcgaagggttcttttcagtgtttgccatctttttcccagccgccactggtatcctcgctggtgcgaacatttctggcgacctcgaggatccgcaagatgccatcccgaggggaactatgctggcgatattcattactaccgttgcgtacctgggcgtggccatctgcgtgggggcctgtgtcgttcgcgatgcaacgggcaacatgaatgataccatcatttcgggaatgaattgcaacggatcggcagcttgcggactgggatacgacttctcccggtgtcggcacgagccttgccagtacggcctcatgaacaatttccaggtgatgtcgatggtgtccggatttgggccgctgatcactgcaggaatcttctcagcaaccctcagctcagcactggcctctctcgtgtcagcgccgaaagtctttcaggcactgtgtaaggacaacatctacaaagccttgcagttcttcgccaagggatacggaaagaataatgaaccacttcgcggatacatccttaccttcctgatcgccatggctttcatcctgatcgcagaactcaacactattgcaccgatcatctcgaatttctttctcgcatcatatgctcttatcaacttctcgtgctttcatgcctcctacgcaaaatcgccgggatggcggccggcctacggcatctacaacatgtgggtttcattgttcggcgctgtgctttgttgtgcggtgatgttcgtcatcaactggtgggcagctgtgatcacctatgtcatcgagttctttctgtatgtgtacgtcacttgcaagaaaccagacgtgaattggggaagctcgacccaggctctttcgtacgtctcggcgctggacaatgcgctggaactcaccaccgtcgaggaccacgtgaagaacttccggccacaatgcatcgtcctcactggcggccccatgacccgtccggctctgctggatattacccatgccttcaccaagaactcaggcctttgtatttgttgcgaagtctttgtgggaccccggaagttgtgcgtgaaggaaatgaattccggtatggctaagaaacaggcatggctgattaagaacaagattaaagcgttttacgccgcggtggcggccgactgctttcgcgatggagtgcgcagcctgctccaagcatcggggcttggtagaatgaagccaaacacccttgtcattggatacaagaagaattggagaaaggcccctctgactgaaatcgaaaactacgtgggaattatccatgacgcgttcgacttcgaaatcggggtggtgattgtgcgcatctctcagggattcgacatctcgcaggtgctgcaagtccaggaggaactggaacggctggaacaggagcgcctggctcttgaggcgactattaaggataatgagtgcgaggaggagtcgggagggatccgcgggctgttcaagaaggcaggcaagctgaatatcactaagaccacgccaaagaaggatggaagcatcaacactagccagtccatgcacgtgggagaattcaaccagaagctcgtcgaagcctccactcaattcaaaaagaagcaggaaaagggaaccatcgatgtgtggtggctgttcgacgatggagggttgactctcttgatcccatacatcctgactctgcggaagaagtggaaggattgcaaactgagaatctacgtcggaggaaagatcaacagaattgaagaggaaaagatcgtcatggcatccctgctctcgaagtttaggattaagtttgcagacatccacatcatcggagatatcaacatccgcccaaacaaggagtcgtggaaagtgtttgaagagatgatcgagccttaccggcttcacgagtcctgcaaggatctgaccactgcagaaaagctgaagcgcgagactccgtggaagatcactgacgctgaactggaagcagttaaggagaaatcataccgccaggtccgcctgaatgaactgctgcaggagcacagccgcgccgcaaacctgattgtgctcagtctgccagtggctcggaaagggagcatttcagatcttctttacatggcctggctcgaaattctgaccaaaaacctgccgcccgtgctgctcgtgcgcgggaatcataagaacgtgctgactttctactcg

SEQ ID NO: 251097 - DNA, 3297 bp, synthetic construct
  misc_feature 1..3297: note = Description of Artificial Sequence: Synthetic coding sequence
  source 1..3297: mol_type = other DNA
atgagcctgaacaacagtagtaacgtctttctggattccgtaccttccaacaccaacaggttccaggtgagcgtgatcaacgaaaatcatgaatctagcgctgccgctgacgacaatactgatcccccacattacgaagaaacatcattcggcgacgaagcccagaaacgcctgcgaatttcgttcagacccggtaatcaggagtgttatgataatttcctccagagcggagagaccgcaaagacagatgccagttttcacgcctacgacagccatacgaacacgtattatctccaaacctttgggcataatacaatggatgccgtccccaagatcgagtactaccgaaatacaggcagcatatccggacctaaagtgaaccggccgagcttgcttgagattcacgaacagctcgctaagaacgtcgctgtgacaccaagctctgctgatcgtgtagctaacggggatgggatcccaggcgacgagcaggctgagaataaagaggacgatcaggcgggtgttgttaaattcggctgggtgaaaggggttctagtgaggtgtatgttaaacatctggggcgtcatgctcttcataaggcttagctggatcgtgggagaagctggaatcggcctcggcgtgatcatcattggacttagcgtcgtggtgacaaccttgacagggatctctatgtcagcaatttgcacaaacggtgttgtgaggggaggtggtgcatattacctgatctcaagaagtttgggcccagagtttggaggctccatagggctgatctttgcatttgccaatgcagtggcggtcgctatgtacgtggtgggcttcgcagagaccgttgtcgacctgctaaaggaatctgactctatgatggtggatcccactaatgacatcaggattattggaagtatcactgtggtcatactgttggggatttcagtagcgggtatggagtgggaggcgaaagcccaggttattctgctggttattttgctgatagccattgcaaattttttcatcggtacggtgattccgagcaacaatgaaaaaaaatccaggggcttttttaattatcaggcatctatctttgccgagaatttcgggcccaggtttacgaaaggggaagggttcttctcagtgtttgctatctttttccccgccgccaccggcatcctggcgggggctaatatttctggcgatttggaagatccacaagacgcaattccaagaggtactatgctcgccattttcattaccaccgtcgcctaccttggcgtcgcaatttgcgtgggtgcttgcgtcgtcagagacgcgacagggaacatgaatgacacaattatttctggtatgaattgcaacggaagtgcagcgtgtggactcggctatgacttcagccgatgcagacacgagccatgccagtatggcctgatgaataacttccaggtgatgtctatggtgtcagggtttggacccctgatcaccgccggaattttctctgccacacttagctcagccctggccagcctggtcagcgcccccaaggtattccaagctctctgcaaggataatatttacaaggcattgcagttcttcgccaagggctatggtaagaataacgaacccctgaggggctatatattaacatttctcatagcaatggcatttatcctcatcgccgagctcaacactatagccccaatcatcagtaacttctttctggctagttatgccctcatcaacttttcgtgttttcatgcctcatatgcaaagtcccctgggtggaggccagcctacggcatctataacatgtgggtgtcgctgttcggggctgtactctgctgcgcggtgatgtttgtcatcaattggtgggcggcagtcattacgtacgtcatcgagttctttctttacgtgtatgtgacatgcaagaagccagacgtaaactggggtagtagcacccaggcgctctcatatgtgtccgccctcgataatgctctcgaacttacaaccgtagaagatcatgtaaaaaacttcaggccccaatgcatagttttaaccggcggtcccatgacaaggcccgctctgcttgatatcacacacgcatttactaaaaactccggactatgcatatgctgcgaagtattcgttgggccacgaaagctttgtgtgaaagaaatgaactctggtatggccaagaaacaggcttggctgattaaaaacaaaatcaaagctttctacgccgccgtggcagctgattgctttcgggacggcgtgcgatcccttctgcaggctagcgggctgggcaggatgaagcccaacacccttgtgatcggttacaagaaaaactggcgcaaggccccattaacagaaatagagaactacgtgggcataattcatgatgcattcgacttcgagataggggtggtcattgtgcggatcagccagggttttgatattagtcaagttctgcaagtgcaggaggaactcgaacgcctggagcaagagcgacttgcattggaggccaccattaaggataatgaatgcgaggaagaaagcggcgggatccgcggtttgttcaagaaagcaggcaagcttaacattactaaaacaaccccaaagaaagacggatcaataaatacaagccaatcaatgcatgtgggcgagttcaatcagaagctggttgaagcttcaactcagtttaaaaaaaaacaggaaaagggaaccattgatgtatggtggctattcgatgatggtgggctgaccctcctgatcccttacatcctaacgttacgaaagaagtggaaagattgcaagctaaggatctatgtaggaggtaaaataaatagaatcgaggaagaaaaaatcgtgatggcttcccttctgagtaagttcagaattaaattcgcggacattcatattattggggatattaacatacgaccaaacaaagaaagttggaaggtgtttgaagagatgatcgagccctatagactccacgagagttgcaaggatttgaccaccgcagaaaaactgaagcgcgagaccccgtggaaaattacggatgccgagttggaggccgttaaagagaaaagctatcgccaggtgaggctgaatgagttactgcaggaacatagccgggcagcgaacctcatcgtcttgagtctacctgtggctcgtaaaggcagtatcagcgacctgctttacatggcttggctggagattctgactaaaaacctgcccccagttctactggttaggggcaatcataaaaatgtgctgaccttctactca

SEQ ID NO: 251098 - DNA, 3297 bp, synthetic construct
  misc_feature 1..3297: note = Description of Artificial Sequence: Synthetic coding sequence
  source 1..3297: mol_type = other DNA
atgtccctgaataactcatccaatgtgttcctggacagcgtcccttcaaacactaacaggtttcaagtctctgtcatcaacgaaaaccacgaatcatcagcggcagcagacgataacactgacccacctcattacgaggaaacctcattcggtgatgaagcgcagaagagactgcggatcagcttccgcccaggaaaccaagagtgttacgacaactttctgcagtccggtgaaaccgcaaagactgacgcatccttccatgcatacgattcacacactaacacgtactacctccagacttttggacacaacactatggatgccgtgcccaaaattgaatactatcgtaacaccggctccatctcgggcccaaaggtcaaccgcccctccctcctcgagatccacgaacagttggcgaagaacgtggcagtgactcctagctctgcagatcgtgtggccaacggagatggcatcccaggggatgagcaggcagaaaacaaggaggacgaccaggcaggtgtggtcaagtttggctgggttaagggagtcctggtgcgctgcatgctgaacatctggggtgtgatgctctttatccgcttgtcctggattgtgggtgaagccggtatcgggctgggagtcattatcattggtctttcggtggtggtgactactctcactggtatttcgatgtcggcaatatgtaccaacggagtggtgaggggaggtggtgcatactaccttatttccagatctctggggcctgagtttgggggttccattggcctgatttttgcatttgccaatgccgtggcggtcgccatgtacgtggtgggatttgctgagacggtggttgatctgcttaaggaaagcgattcgatgatggtggatccaactaatgacatccggattattggttccattactgtggtgatacttcttggtatttcagtggcgggtatggaatgggaggcaaaggcacaagttatactgctcgtgatcctgcttatcgcaattgcaaacttctttatcggcaccgtgattccatcgaataatgagaagaagagccgtggttttttcaactaccaggcctcgatatttgcagagaatttcggacccagatttaccaagggagagggcttcttttcagtgttcgccattttctttccggccgccactggaattttggcaggagcaaacatcagcggtgaccttgaagatcctcaagatgcgatccccagaggaaccatgcttgcaatattcatcaccaccgtggcttaccttggagttgctatttgtgtcggcgcatgtgttgtgagagatgcaaccgggaacatgaacgataccattatctccggtatgaattgtaatggatcggcggcgtgcggactcggctacgattttagccggtgtcggcatgagccgtgccaatacggcctcatgaataactttcaagtcatgtcgatggtgtccggatttggaccgcttatcacggccgggatattcagcgccaccctgagctccgcccttgcgtcgctcgtgtcagcaccgaaggtgttccaggcactgtgcaaggataacatttacaaggcacttcagttttttgcgaagggttacggtaagaacaacgaaccacttcgcggatatatccttacctttctgattgcaatggcctttatcctgatcgccgaacttaatactattgcccctattatctcgaatttcttcctggcatcatacgcactcatcaatttcagctgctttcacgcctcatacgcaaagtcaccgggctggcgccctgcatacggaatttacaacatgtgggtgtcactttttggggcagtgttgtgttgtgcagtgatgtttgtgatcaactggtgggcagcagtgataacctacgtcatcgaattctttctgtacgtgtacgtgacttgcaaaaaaccagacgtcaactgggggtcatccacccaagccctgtcatacgtgtcggcactggataatgctcttgagctgacgactgtcgaagatcatgtgaaaaacttcaggccgcagtgcattgtgctcaccggcgggcctatgaccagacccgccctccttgatatcacccatgcctttaccaagaattcagggctgtgtatatgttgtgaagtttttgtgggaccccgaaagctgtgcgtgaaggagatgaattcgggaatggcaaagaaacaagcatggctgatcaagaataagattaaggccttttacgcagccgtggccgcagactgcttcagggatggcgtccggtccctgctgcaagcctctggactgggtcggatgaagccaaataccttggtgatagggtacaagaagaactggcggaaagcacctctgaccgaaattgaaaactacgtgggaatcattcacgatgcatttgattttgagatcggagttgtgatcgtccgcatctcgcaaggctttgacatcagccaggtgctgcaagttcaagaggaactcgaaagactggagcaggaacgactcgcacttgaggctactatcaaggacaacgagtgtgaagaagaatctggaggtattaggggactgttcaagaaagcaggtaaacttaacataactaagaccactccgaaaaaagatggcagcattaacacctcgcagagcatgcatgtcggagaattcaaccaaaaactggtggaggcatcgactcaattcaagaaaaagcaagaaaagggaaccattgacgtgtggtggctgtttgatgacgggggacttactcttctcattccttacattctcacccttagaaagaagtggaaggattgtaagctcagaatctatgtcggtggcaaaatcaatagaattgaagaggagaagatcgtcatggcctcgcttttgtccaagtttagaattaagtttgctgatattcacattataggggacataaacatccggccaaacaaggagtcgtggaaagtgttcgaagaaatgattgagccataccggctgcatgaatcgtgtaaggatctgactactgccgagaagctcaaaagagaaactccgtggaaaatcacggatgcggaattggaagcagtcaaggaaaagtcctaccggcaggtccgtctgaacgaactcctccaagaacattcccgtgcagccaacctgattgtgctgagcttgccggtcgctagaaagggatcgatctctgaccttctgtacatggcatggctggagattcttacgaagaatttgccccctgtgttgcttgtcaggggcaaccacaaaaatgtcctgaccttctattcg

SEQ ID NO: 251099 - DNA, 3297 bp, synthetic construct
  misc_feature 1..3297: note = Description of Artificial Sequence: Synthetic coding sequence
  source 1..3297: mol_type = other DNA
atgtccctcaataactcgtcgaacgtgttcctcgactccgtcccgagcaacaccaatcggttccaggtcagcgtgatcaatgagaatcacgaaagctccgcggcggctgatgacaatactgatccacctcactatgaggaaacttcctttggggacgaagcccagaagaggctgcggatctccttccgcccaggtaaccaggagtgttacgacaacttcctccaatccggggaaactgccaagacggacgcatctttccacgcatacgactcccatactaacacttactaccttcagactttcggacacaacaccatggacgcagtgcccaaaatcgaatactacagaaacaccggatccatcagcggtccgaaggtcaaccgcccttcccttctcgaaatccatgagcaactggcgaaaaatgtggcggtgaccccatcctcggccgatcgcgttgcgaatggagacggaatcccaggggacgaacaggcagagaacaaagaagatgaccaggcgggcgtggtgaaattcggatgggtgaagggagtgcttgtcagatgcatgttgaacatttggggcgtgatgctcttcatccggctctcgtggatcgtgggtgaagctggtatcggactgggggtgatcatcatcgggctcagcgtggttgtgactacgttgaccgggatttcgatgtcagccatctgtactaatggcgttgtgcggggaggcggagcttactacctgatctctcgctccctcggacctgagttcggcggatcaattggcctgatctttgccttcgcaaacgccgtcgccgtcgccatgtacgtcgttggattcgcagagactgtggtggatctgctgaaggagtccgacagcatgatggtggatcccaccaacgacatccgcattatcgggagcatcactgtcgtaatcttgctggggatctcagttgcgggcatggaatgggaagcgaaagcgcaggtgattctcctcgtgatcctgctgatcgcgatcgccaatttctttatcggaactgtgatcccatcgaataacgaaaagaagagccggggattcttcaattatcaggcctctatcttcgcagaaaacttcggccctagattcaccaagggagaaggctttttctccgtgtttgcaatcttttttccggcggccactggcattcttgcgggcgcgaacatcagcggagatttggaggatccgcaagacgcgatcccgagaggcactatgctggcaatcttcatcactaccgtggcctacctcggagtggctatctgcgttggagcctgcgtggtcagagacgcgaccggaaatatgaatgacactatcatttctggaatgaattgcaatggttccgccgcatgtgggctcggatacgacttctcgagatgtcgccatgaaccatgtcaatacggcctcatgaacaacttccaggtgatgtcaatggtgagcgggtttggacccctgatcaccgccggcatctttagcgccactctgagcagcgccctggcatcgctggtgtctgccccgaaggtgttccaggcactttgcaaggacaacatctacaaggcgcttcagttctttgcgaaaggctacggaaagaataatgagcctctccgcggatatatcctgacctttctcatcgccatggctttcattctgatcgcagaactcaatactatcgcacccatcatttccaacttcttcctcgctagctatgctcttatcaactttagctgcttccatgcctcgtacgccaagagcccgggctggcggcctgcctacggaatctacaacatgtgggtgtcgctgttcggtgctgtgctctgctgcgcggtgatgttcgtgataaactggtgggctgcggtgattacctacgtgattgagttttttctgtacgtgtacgtcacttgtaagaagcccgacgtgaactggggatcctcaacccaggcactgtcgtacgtgagcgcactggataacgcgctggagttgactaccgtggaagatcatgttaagaacttccgcccgcagtgtattgtgctcaccggaggccccatgactcgcccggccctgctggacattactcacgctttcactaagaattcgggtctttgcatctgctgtgaagtgttcgtgggaccgcgcaagctgtgcgtgaaggaaatgaactcaggaatggcaaaaaagcaagcatggctgatcaagaataagatcaaggccttctacgctgcggtcgccgccgattgctttcgcgacggcgtccggagcctgctgcaggcgtccggcctgggaaggatgaagcctaacaccctggtcatcggatacaagaagaattggaggaaagctccgcttaccgagatcgaaaactacgtcggcataattcatgatgcatttgactttgaaatcggagtcgtgatcgttcgcatttcacagggtttcgatatctcgcaggtgctgcaagtgcaagaggagctggagcgactggagcaggaaagactggccctggaagccaccattaaggataatgagtgcgaagaggagtctggaggaatccggggactctttaagaaggccggcaaacttaacatcaccaagactactcctaagaaagacggatccatcaatactagccagtccatgcacgtgggcgagtttaaccagaaactggtggaagccagcacccagttcaaaaagaagcaagagaaggggactatcgatgtttggtggctctttgacgacggggggctgactctgcttatcccgtacattctgaccctgcggaaaaagtggaaggattgtaaactgcgtatttacgtcggtgggaagatcaatcggatcgaagaagaaaagattgtcatggcctccctgctgtccaagttccggatcaagttcgctgatatccatatcattggggacatcaacattcgccctaataaggaatcatggaaagtgtttgaggaaatgatcgaaccttaccgcctccacgaaagctgtaaggacctgacgacggcggagaagctcaagcgggagactccttggaagatcaccgacgcggaattggaagccgttaaggagaaatcctaccgccaggtgaggctgaatgaactgttgcaggaacactcacgcgctgcgaacctgatcgtgttgagcctgccggtcgcacgtaaaggaagcatctcggacctgctgtacatggcctggctggagatactcacgaaaaacctgcctccggtcttgctggtgagaggaaaccacaaaaatgtgttgaccttctactcg

SEQ ID NO: 251100 - DNA, 3297 bp, synthetic construct
  misc_feature 1..3297: note = Description of Artificial Sequence: Synthetic coding sequence
  source 1..3297: mol_type = other DNA
atgtcattgaacaattcctccaatgtgttcttggattccgtgcctagtaacactaatcgctttcaagtcagcgttattaacgagaaccatgagtcatccgctgctgctgacgataatacagatccacctcattatgaggagacatcatttggagatgaggcccagaaacgcttgcgaattagcttccggccgggcaaccaggaatgctatgacaacttcctgcagtctggagaaacggccaagaccgatgcttcattccacgcttacgatagccataccaatacatattacctacagacattcgggcataacacaatggatgccgttccaaagatcgaatactaccggaatactggctccataagcggccccaaggtgaatcgaccttctctgctggagattcatgaacaactcgctaaaaatgtcgccgtgaccccttccagtgcagacagggtggctaacggtgacggcattcccggagatgagcaggccgagaataaggaggatgaccaggcaggagtagtcaagtttggatgggtgaaaggagtcctggttaggtgtatgctcaatatctggggtgtgatgctatttataagactctcatggatcgtaggagaggccgggatcggcctcggcgtgattatcatcggcctgtctgtggtagttaccaccctgaccggcatttcaatgagcgcaatctgtacaaatggggttgtgaggggcggcggtgcctactatcttatcagcaggagcctaggtccagagtttggtgggtcaattggattgattttcgcctttgctaacgcagtggcggtggccatgtacgtggtaggtttcgccgagacagtcgtcgatctgctgaaggaaagtgactctatgatggtggatccgaccaatgatataagaataatcggcagtattactgtggttattcttcttggaatctcagtggcaggaatggaatgggaagccaaggcacaagtaatcctgttggtgatactgctgatcgcaatcgcaaattttttcatcgggaccgtgattccgagtaacaacgagaagaaatcaaggggattctttaactaccaagcatctattttcgcggagaattttgggcctcggttcaccaaaggggaggggttcttctctgtttttgctattttttttcctgccgcgactggaatcttagcaggtgccaatattagtggcgatctggaagatcctcaggacgccatcccccgggggaccatgctcgccatctttatcacaacagttgcctacctgggcgtggctatatgtgtgggcgcatgtgttgtgagggacgccaccgggaacatgaacgatacaatcatctcaggtatgaactgtaatggaagcgctgcatgcggcctgggttacgacttctctcgctgccgccacgaaccctgccagtacggactcatgaacaactttcaggtgatgtcaatggtcagcggctttgggccactaatcacagccggcatcttcagcgctactctgtcctccgccctggcgtccttggtgtctgccccaaaggtgttccaggcactgtgtaaagacaacatctacaaagccttgcagtttttcgccaaaggctacggcaaaaataacgagcctctacgtggatacatcctcacctttctgatagcaatggccttcatccttattgccgagctcaatacaattgccccgatcatttccaatttctttctagcatcttatgccttaatcaacttctcctgttttcacgccagctacgcaaagtcccctggctggcggcccgcctacggcatctataatatgtgggtctccttattcggcgccgtactgtgttgtgccgtaatgtttgtcataaactggtgggctgctgtgatcacatatgtgatagagttttttctgtatgtgtatgttacttgtaagaagcctgacgtgaactggggctccagtacacaggccctaagttacgtgtcagccttagataatgccttggaactcacaaccgtggaagatcatgtgaaaaacttcaggccccagtgcatagtgctcaccggtggacccatgacgagaccagctctcctcgatattactcatgcatttaccaagaattccgggctgtgtatttgctgcgaagtttttgttggtccccgcaagctctgcgtgaaagaaatgaattccgggatggctaaaaagcaagcctggctcatcaagaacaaaataaaggctttttatgccgccgtcgccgccgattgcttccgggacggagtcaggagcctgctccaggcttcgggcctagggcggatgaagcccaacactctcgtgatcggatataaaaagaattggaggaaagctcctttaaccgaaattgaaaactatgtgggaatcatccatgatgcgttcgatttcgaaatcggagtggtaattgtgagaattagtcagggctttgatatttcccaggtgttacaggtccaggaagagctggagaggctcgagcaggaaagattggccttggaagcgacaataaaggacaacgagtgtgaagaggagagtggggggataagaggcctgtttaagaaggcagggaaactgaatattactaagactactccgaaaaaggacgggagcatcaacacctcacagtcgatgcacgtgggcgagtttaaccagaaactggtggaggccagcacgcagtttaagaaaaagcaggaaaaggggacaattgacgtatggtggcttttcgacgacggtgggcttaccctgctgatcccctatatactgacgctacgaaagaaatggaaggactgcaagctgcgcatttatgttggcggaaagattaaccgtattgaagaagagaaaatagtgatggcatcactgctatccaagtttcggattaagtttgccgatatccacatcattggcgacatcaacatacgacctaacaaggagagctggaaggtgttcgaagagatgatcgaaccttacaggctgcacgaatcatgcaaggacctgaccactgccgagaagctgaagagagaaacaccctggaagatcaccgatgccgaactggaggctgtcaaagaaaaatcatatcggcaggtgcggctgaacgagctgttacaggaacattccagggccgcaaacctgattgtgctcagcttgcccgtagcaagaaagggtagcatctccgaccttctgtacatggcatggttggagatcctcacgaagaatctgcctcctgtgctgctagtgaggggcaaccataagaacgtgctgaccttctattcg

SEQ ID NO: 251101 - DNA, 3297 bp, synthetic construct
  misc_feature 1..3297: note = Description of Artificial Sequence: Synthetic coding sequence
  source 1..3297: mol_type = other DNA
atgtctcttaacaacagctcgaatgtctttctggactcagtaccgagcaatactaaccgttttcaggtgtctgttatcaatgaaaaccatgaatctagcgcagccgctgatgacaacacagatcctcctcactatgaagaaacctctttcggagacgaggctcaaaaaaggctgcgtatatcctttaggccaggaaaccaagagtgctatgataatttcttgcagtctggagaaacggctaaaacagatgcctccttccacgcatatgatagtcacacaaacacatattacctccaaaccttcggacacaacactatggatgctgtccccaaaatcgagtactataggaacacaggttccattagtggccctaaagttaaccgacctagccttttagagattcacgaacagttagccaaaaacgttgcggtgactccttctagcgcggaccgggtggcaaacggcgatggcattccaggtgatgaacaagccgagaacaaggaagacgatcaggctggagttgttaaatttggatgggttaagggtgtactggtgcgctgcatgttgaacatttggggagttatgttgttcattaggttatcttggatagtcggcgaggctgggatcggcctgggcgtaatcattattggactatcagtggttgttaccacccttaccggaatctctatgtcagctatttgcactaatggagtggtaaggggtggaggtgcttattacttaatatccagatccttgggtcctgaattcggggggtcaattggtttaatcttcgcattcgctaatgctgttgcagtggctatgtacgtagtaggatttgctgagactgttgttgatctgctaaaagaatccgacagcatgatggtagatccgaccaatgatataagaattatcggatcaataacagttgtcatactcctcggaatttctgttgccggtatggagtgggaggcaaaggcccaggttattttgctagttatcttgcttattgcaattgctaatttctttatcgggacagtgattccgtcgaataacgagaaaaaatccaggggtttcttcaactaccaggcttctatttttgctgagaattttggtccaaggtttaccaaaggagaaggttttttcagcgtctttgctattttttttcccgctgccacaggtatattagccggcgccaacatatccggagatcttgaagaccctcaggatgccattccccgtggtactatgcttgccatttttataacaactgtcgcatacttgggagtggcgatctgcgtaggtgcttgcgttgtaagggatgctaccggaaacatgaacgatacaattatttcggggatgaattgcaacggaagtgctgcttgcggactagggtacgacttctctcgttgtagacatgagccctgccagtacggtcttatgaataacttccaagtgatgtctatggtttcaggcttcggaccacttatcacagctggaatctttagtgccactctttcgtctgctctcgcttcactcgtttctgcaccgaaggtgttccaggctctgtgtaaagacaacatatataaggctttgcagttctttgcaaaaggttacgggaagaacaatgagcctttaagagggtatattcttactttcttaattgcaatggcatttatattaattgcagagcttaacactatcgctcccattataagcaattttttccttgcgagttatgccctgattaacttctcctgctttcatgcttcatatgctaaatcaccaggttggaggcctgcctacggcatctataacatgtgggttagtttgtttggtgctgttttgtgttgcgccgtcatgttcgttataaattggtgggctgctgtcataacctatgttatcgaattttttttgtacgtatatgtaacgtgtaagaaaccagatgtaaattggggctcaagtacacaagccttatcctatgtgtccgccttggataacgctcttgagttgactaccgttgaggatcatgttaagaactttagaccccagtgcatcgtgttgaccggaggacctatgacgaggccagctctgctggatatcactcacgcatttacaaaaaattccggattgtgcatttgttgtgaggttttcgttgggcctaggaaattgtgcgtgaaggaaatgaactccgggatggcaaagaaacaagcttggttgatcaagaataagattaaagctttttacgctgctgtagccgctgactgttttcgggatggggttcgttcattactccaggcttctggtttaggtcgaatgaaacctaacacccttgtaataggatacaaaaagaactggaggaaagcccctcttacagagatcgaaaactacgtaggtatcatccacgatgcttttgactttgagatcggtgtcgttatagttagaatcagtcagggatttgatattagccaggtgttacaagttcaggaggaactagaaagattagaacaggaaagacttgcccttgaggcaactattaaggataatgaatgtgaggaagaaagcggaggaatccgtggtttattcaagaaagctggaaagcttaatataactaagaccacaccaaagaaggacggttctataaacaccagtcagtctatgcatgtaggagagttcaatcagaagttggtggaggcttctactcaattcaaaaagaagcaggagaaaggtactattgatgtttggtggctatttgatgatgggggtttgacgcttttgattccatacattttaactttgagaaaaaaatggaaggattgcaaacttaggatttatgtaggcggtaagattaatagaattgaagaagaaaagattgtaatggcttctttattgtccaaattcagaataaaattcgccgatatacacatcattggtgacataaacatcaggcccaataaagagtcatggaaggtttttgaagagatgatcgaaccatacagactccacgagagttgcaaggatcttacaactgctgagaagcttaagagggaaacaccttggaagataaccgatgctgaacttgaggcggtaaaggagaagtcttatcggcaagtgagattgaacgaacttcttcaagaacactctagagctgccaatctgatcgtgctctccctaccggtggctaggaaaggtagtattagcgatttactttatatggcgtggcttgagattctcacaaaaaacttgccacctgtacttcttgtccgaggaaaccataaaaatgtgctgaccttttattcg

SEQ ID NO: 251102 - DNA, 3297 bp, synthetic construct
  misc_feature 1..3297: note = Description of Artificial Sequence: Synthetic coding sequence
  source 1..3297: mol_type = other DNA
atgtctctgaacaactctagcaacgtttttttagatagtgtccctagcaacacgaatcgatttcaagtgtctgtcatcaacgagaatcacgagagttccgcagcagcagacgacaacacggatcctccacactatgaggagacttctttcggggatgaggcccagaagagactacgcatttcctttagacccggcaatcaggagtgttacgataatttcttgcagtctggcgaaaccgcgaagactgacgcctcctttcatgcatacgatagccacaccaatacgtactatctgcagacattcggccataacacaatggacgcagtcccgaaaattgaatattacagaaacactggaagcatcagcggtccgaaggttaataggccttcgcttctggagatccatgaacagctagcgaaaaacgtcgccgtcacaccctcatcagctgatagggtggccaatggagatggtatccccggtgacgagcaagctgagaataaagaagacgatcaggctggagtggttaagtttggctgggtgaagggagtgttagtccgctgcatgctcaatatttggggcgtcatgctgtttatccgactgtcgtggattgtgggggaggccggtataggcctgggcgtgataattatcggcctgtcagtggtggtgactacccttacggggatttcgatgtcagccatctgcacaaatggggtcgtgcgcggagggggcgcttattatcttatctccaggagcctgggtccggagtttgggggaagcatcgggctgatttttgcttttgccaacgcagtggctgtggccatgtacgtggtggggtttgccgaaactgtggtggacttgctgaaagaaagtgacagcatgatggtcgaccccactaatgacatcagaatcattggatcaatcaccgtggttatcttacttggaatctcagttgcagggatggaatgggaagcaaaggctcaagtcatactgctcgtgatcctattaatagcaatcgcgaactttttcatcggaacagtaataccaagtaacaacgagaagaagtctaggggcttctttaattatcaagccagcatctttgcagagaactttggcccacgttttacgaagggcgaggggtttttttcagtgttcgccattttttttcctgccgcgacaggaatactggcgggggcgaatatttccggggaccttgaggacccacaggatgcgattccacggggcacaatgctggccattttcatcactactgtggcttacctgggggtcgccatttgcgtaggtgcctgtgtggtgcgggacgccacgggaaacatgaacgataccataattagcggcatgaactgtaatggaagtgcagcttgtgggctgggatatgacttcagccggtgtagacatgaaccttgtcagtacggcctgatgaacaattttcaggtcatgtctatggtgagcggtttcggtcctttgatcaccgccgggatcttttctgcgaccctgtcatctgctctcgcaagcttagtatctgctccgaaggtttttcaagccctgtgcaaggataatatctacaaagcgttgcagtttttcgccaagggctatggaaagaacaacgaacccctccggggttatatcctcaccttcctgattgccatggcatttattctgatagccgaactaaacacgatcgccccaataatttctaactttttcttggcctcttatgcattgatcaacttctcatgtttccatgccagttacgcgaaatctcctggttggaggcccgcgtatgggatatacaacatgtgggtcagtctgtttggagccgtgctatgctgcgccgtgatgttcgtcattaattggtgggccgccgtgatcacatatgttatagaattcttcttgtacgtgtacgtgacttgtaaaaagccggacgtgaattggggaagctcaacccaggcgctgagttacgtgtctgctttagacaacgccctcgagcttacgaccgttgaagaccacgtgaagaacttcagaccacagtgcatcgttctgactggtggcccgatgacccggcccgccttgcttgacatcacacatgcattcactaagaattccggactgtgtatctgttgcgaggtatttgtggggccccggaaactttgcgtaaaagagatgaatagtggaatggccaaaaagcaggcctggctgatcaaaaataagattaaagccttctatgcagctgttgccgcagattgctttcgagacggcgttagatcgctgctgcaggcaagtggcttggggcgaatgaaaccgaacaccctggttattggctacaagaagaactggaggaaggcccctctgactgagattgaaaactatgtgggaatcatccatgatgcatttgatttcgaaattggggtggtgattgtacggatctcgcaaggattcgacattagccaagtgttacaggtgcaggaggaactcgagagactcgagcaggagagactggccctggaggcaactattaaggataacgaatgcgaggaggagagcggcggtatccgtggattgttcaaaaaggcaggaaaattgaacatcacaaaaacaacccccaagaaagatggaagcatcaatacctcccagtccatgcacgtgggagagttcaaccagaaactggttgaagcgtctactcagtttaagaagaagcaggaaaaagggaccatcgacgtttggtggctgtttgatgacgggggtctgaccctgctgataccttacatcctgacactgcgtaaaaagtggaaagattgcaaacttaggatatacgttggcggcaaaataaatcgtatcgaagaggaaaagattgtcatggccagtttgctttcaaagtttcgcattaagtttgcggacattcacataataggtgacattaatatcaggcctaacaaagaatcctggaaggtcttcgaggagatgatcgagccttatcggttgcatgagtcttgtaaggatcttactaccgcagaaaagcttaaacgtgaaacaccatggaagattaccgatgcagaactcgaagccgttaaggaaaaatcctaccggcaggtgcgcctcaatgaattgcttcaagagcacagcagagcggccaatctcatcgtgctcagtctgcctgtagcacgtaagggatctatttctgacctactgtatatggcttggctggagattctgactaagaacctccctcctgtcctgctagtgagaggcaaccataaaaacgtactcacattttactca

SEQ ID NO: 251103 - DNA, 3297 bp, synthetic construct
  misc_feature 1..3297: note = Description of Artificial Sequence: Synthetic coding sequence
  source 1..3297: mol_type = other DNA
atgtctctaaacaatagttcgaatgttttcctcgactcggtcccatctaacacaaaccggtttcaggtgtctgttattaacgagaatcacgagagctccgccgcagcggatgataatactgaccccccacactacgaagaaacctcgttcggtgacgaggcgcaaaaacggttgcgcatttcttttcgcccgggcaaccaagaatgttacgataacttcttacagagcggagaaacagccaagacagacgcgagcttccacgcttacgattctcatactaatacctattatcttcagaccttcggccataacactatggatgccgtacccaaaatcgaatactatcgtaataccggttcaatctccggacccaaggtgaaccggccttcgcttctggagattcacgaacaacttgctaaaaatgttgccgttaccccatcatccgctgatcgggtcgcaaatggcgacggcatcccaggcgacgagcaggcagaaaataaggaggatgaccaggccggcgtcgttaaatttggttgggtgaagggagttctggtcagatgcatgcttaacatctggggcgtcatgctgttcataaggttgagctggattgtgggggaggctggtataggtttgggcgtgattattatcgggctgagtgtagttgtgactaccttaaccggtatcagcatgtcagcgatttgtacaaacggggtggttaggggaggcggtgcgtactacctgatctcacgctcgctcggccctgagtttggaggcagcattgggctgatctttgcattcgcaaatgccgtagccgtagctatgtacgtcgtaggttttgcagaaaccgttgtggatcttctgaaggaatctgactcaatgatggtggatcctacgaacgacattcgtattatcggatcaatcactgttgtgattctcctcgggatctctgttgcgggtatggagtgggaagcaaaagctcaagtgatactgttggtgattttgctcattgccattgctaatttcttcattggcacggttattccttcgaataacgaaaaaaagtcgcggggtttcttcaactaccaggcatcaatttttgctgagaactttgggccccgcttcaccaagggcgaaggcttcttcagtgtgtttgcaattttcttccctgcagcgacgggaatcctcgctggcgctaacatctctggtgatctagaggacccccaggatgccattccgcgtggaaccatgcttgctatcttcatcaccaccgtggcctatttgggcgttgccatctgtgtgggcgcctgtgtcgtccgagacgctacggggaacatgaacgatacaataatctctggtatgaactgtaatggttccgccgcctgtgggttaggttatgatttctctcgttgtcggcacgagccctgccagtacggtttgatgaacaatttccaggtaatgagcatggtctcgggctttggtcctttgattacagccggaatcttctcggcgaccctaagctcggcacttgcatctctggtctctgctcctaaggtgtttcaggcactttgcaaagataacatttacaaggcgttgcagtttttcgcgaagggatatggaaaaaataatgaaccattgcgtgggtacatactcacctttctgatcgcaatggcatttatccttattgcggagcttaacactatcgcacctatcatttcgaacttctttttggcttcatacgcactgattaacttcagctgtttccatgcatcttacgccaaatctcctgggtggcgaccagcttatggaatctataacatgtgggtgtcattgttcggtgctgttttatgttgcgccgtcatgttcgttattaactggtgggccgcggtcataacctacgtaatcgagttcttcctctatgtctacgttacatgtaagaagccggacgtcaattggggttcgtcgactcaggcacttagctatgttagcgctttggataatgctttagaactcaccaccgttgaagaccacgtcaagaactttcgtccacaatgcattgtgctaaccggaggaccaatgaccaggccggcgctgctggatatcacgcatgcctttaccaagaatagcggactgtgtatctgttgtgaagtctttgtcggccccaggaaattgtgtgttaaagaaatgaattctgggatggcgaaaaagcaggcttggctcattaagaataagatcaaggccttttacgcagccgttgccgccgattgcttcagggacggagtacggtccttattgcaagcttctgggctgggtcggatgaaacccaacacgttggtcattggatataaaaaaaactggcgaaaggcaccccttactgaaattgaaaattatgttggaataattcatgatgcgtttgacttcgagatcggcgttgtcatcgtgcgtatcagtcaaggattcgatatctcccaagtcttgcaagtgcaggaggaactggagcgtctcgaacaggaaagacttgcgctagaagcgaccataaaggataatgaatgcgaagaggagtccgggggtattcgtgggttgttcaaaaaggctggcaagctaaacatcacgaagacaacccccaagaaagatggatctattaacaccagccagtcaatgcacgtgggggagtttaaccagaagctcgtcgaggccagcacccaattcaagaagaaacaggagaagggtacaattgatgtctggtggctgttcgacgacggcgggctgacgttgctcatcccctacattcttactttgcggaagaaatggaaggattgcaaacttcgcatatatgtaggtggcaagataaaccgcatagaagaagagaaaattgtgatggcctccttgctctctaaattccgcattaagttcgcggatattcatatcattggtgatataaacatccggccgaacaaagagtcttggaaagtgtttgaagagatgattgagccatatagacttcacgagtcctgtaaggatttaacgactgcggagaagctcaaacgtgagaccccttggaagatcactgatgctgagctcgaggccgttaaggaaaagtcgtaccgccaagtccggcttaacgagttgctacaggagcattccagggcagcaaatctcatcgtattgagtcttccagtcgctcggaagggttctatctctgatttgttgtatatggcatggctcgagatacttacgaagaatctacctccggtgcttctggtccgaggcaaccataagaatgtactcacgttctactcc

SEQ ID NO: 251104 - DNA, 3297 bp, synthetic construct
  misc_feature 1..3297: note = Description of Artificial Sequence: Synthetic coding sequence
  source 1..3297: mol_type = other DNA
atgtctctgaataattcatccaatgtgtttctggactccgtgccctcgaatacaaacagatttcaagtgtcggttattaatgaaaatcacgaaagctcagcggcagctgacgacaataccgacccgccccattacgaggagactagcttcggcgatgaagcacaaaagcgtctgcgaatctcattccgacccggcaaccaggaatgttacgataactttttacagtcaggagaaactgcaaagaccgatgctagtttccacgcgtatgattctcacactaacacatactatcttcagacattcgggcacaacaccatggatgcggtcccaaaaatcgaatactatcgcaacaccggcagcattagcgggcctaaggttaaccggccgagcctcttggagatccacgagcaactggctaagaatgtcgccgttacgcccagcagcgccgaccgagtggctaacggagatgggattcccggggacgagcaggctgagaacaaagaggacgatcaggctggtgtggttaagttcggctgggttaagggagtactggtccgatgcatgctcaatatttggggagtgatgctgtttatcagattgagttggatcgtgggagaagccggcatcggcctgggagtcatcatcataggactgtcagtggtggtaaccaccctgaccggcatctctatgtccgcaatatgcacaaacggggtggtgaggggcgggggggcttactacctgatatcccgaagtctcggccctgagttcggggggagcattggtctgatatttgcgtttgccaacgccgtggccgttgcaatgtatgttgttggcttcgccgagacagtcgtggacctactgaaggagtccgattctatgatggtcgaccctactaatgatatccgcatcattgggagcatcaccgttgtcattttgcttggcatttctgtggccgggatggagtgggaagctaaagcccaagtcatcttactagtgatcctcttaattgccatcgctaactttttcatcgggactgtgattcctagcaacaacgaaaaaaagtctcggggctttttcaactaccaggcctccatctttgccgagaattttggccctaggttcactaagggcgaaggcttctttagcgtgtttgcaatcttctttccggctgctactgggatccttgctggagccaatatatccggcgatttagaggatccccaagacgcaatcccgcgcggaaccatgctggccatcttcattacaacagtggcatatctgggagttgccatctgtgtcggcgcctgcgtcgttagagatgcaactggcaatatgaatgataccatcatctcagggatgaactgtaatggatcagctgcctgtggtctgggctacgacttcagcaggtgtcggcatgagccgtgccagtatggactcatgaataatttccaagtgatgtccatggtgtctgggttcgggcctttgattacggccggaattttctctgccactctcagctccgcgttggcctccctggtgtctgcccctaaggtatttcaagctctctgtaaggacaatatctacaaggcactgcagttcttcgctaagggctacggcaagaacaatgaacctctgcgcggctatattctgacattcctgatagctatggcatttatacttatagccgaactgaatacgatagccccaattatcagtaatttcttcctggcaagttacgccctcattaatttctcctgttttcacgccagctacgctaaaagtcccgggtggcgcccagcgtatggcatatacaacatgtgggtgtcactctttggcgccgtgttgtgctgcgccgtgatgttcgtgattaactggtgggctgcagttattacgtatgtgatcgaattcttcctgtatgtatatgtaacctgcaagaagcctgatgtcaattggggcagtagcacccaggctctttcttacgtttcggccctagataatgccttggagttgacgacagtagaggatcatgtgaaaaacttccggccacaatgcatcgtactcacagggggacctatgactaggcccgctctgctggatattacacatgcttttactaaaaattcaggcctctgtatttgttgcgaagtctttgtgggcccccgcaagctttgcgttaaagaaatgaactctgggatggctaaaaagcaggcatggctgataaaaaacaaaatcaaagccttttacgctgctgtcgccgccgactgttttcgcgatggcgtgcgcagcctgctgcaggctagcggattaggacggatgaaacctaatacgctggtgatcggctacaagaaaaactggcggaaagctcccctcaccgaaatcgagaattacgtgggtatcatccatgacgcttttgattttgagatcggagtcgttatagtgagaatttcacagggcttcgacataagccaggttctccaggttcaggaggagctcgagcggctcgaacaagaacgcttggcacttgaggcgaccatcaaagacaacgaatgcgaagaggagagcgggggtataagggggctcttcaaaaaggccgggaaactaaacatcactaaaactacccccaaaaaggacgggtccattaacaccagtcagtcaatgcatgtcggagagttcaatcaaaagcttgttgaagctagcacccagtttaagaaaaaacaggaaaagggaacaattgacgtctggtggctgttcgatgatgggggcctgacactcttaatcccttacattctcactctgagaaagaaatggaaggactgtaagctgcggatatatgtcggggggaaaattaatagaatagaagaagaaaagattgtgatggccagcctgctcagtaagttccggattaagttcgcagatattcacattatcggggacatcaacatcagaccaaacaaagaatcgtggaaggttttcgaagagatgatcgagccatacaggctgcacgaatcctgcaaggaccttaccaccgctgagaagttaaagagagagacaccatggaagatcactgatgcagaacttgaagcagtaaaggaaaagtcataccgccaggtcagacttaatgagctgctccaagaacacagtcgggcggctaacctgattgtgctgtctctgcctgtggctcgaaaaggctccatcagtgacctgctatacatggcatggttggaaatcctgaccaagaatctgccccctgtgctgctggtgcgcggcaatcacaagaacgtgctgactttttacagt

SEQ ID NO: 251105 - DNA, 3297 bp, synthetic construct
  misc_feature 1..3297: note = Description of Artificial Sequence: Synthetic coding sequence
  source 1..3297: mol_type = other DNA
atgtcgctcaacaactcgtccaatgtctttctcgatagcgtgccaagcaataccaatcggtttcaggtgtcagtgatcaacgagaaccacgaatcgtccgctgctgccgacgacaataccgatccgccacactacgaagaaacttcgtttggagacgaagcacagaagaggctccgcatttcatttaggccgggcaaccaagagtgttacgataactttctgcaatccggggagactgccaagaccgatgcctccttccatgcgtacgactcccatactaacacgtactacctgcagaccttcggacacaacacgatggatgcagtcccaaagattgaatactatcggaacactggttccatttccggacccaaagtgaaccgaccgtcgcttctcgagatccatgaacagctggcgaaaaacgtcgcggtgaccccatcttcagccgatcgggtggcgaacggagacggaatccctggcgatgaacaggctgaaaacaaggaagatgaccaagccggtgtcgtgaaattcggctgggtgaaaggagttctggtcagatgcatgctcaacatttggggagtgatgctgtttatccggctgtcatggatcgtgggcgaagcaggaattggactgggcgtgatcatcatcgggctcagcgtggtggtcactaccctcactggcatcagcatgtcagccatttgcactaacggcgtcgtgcggggcggaggagcttactaccttatttcaagaagcctcgggccagaatttggcgggtccatcggactcattttcgcctttgccaacgcggttgcggtggctatgtacgtggtcgggtttgctgaaacggtggtggacttgctcaaagaatcggactcaatgatggtggatccgaccaatgacatccgtattatcggatcgatcaccgtcgtcattctgctcggaatctccgtggcaggcatggagtgggaggccaaagctcaagtgatcctgctcgtgatcctgcttattgcgattgccaactttttcattggaactgtgatcccttcgaacaacgaaaagaaaagtagaggattcttcaattaccaggcatccatctttgcagagaatttcgggccgcgcttcaccaagggagagggattcttctcggtctttgccatcttcttcccggcggccaccggcatcctggctggagcaaacatctccggggacctggaggaccctcaggatgctatccctaggggtacgatgttggcaatcttcatcaccactgtggcctaccttggcgtggcgatctgcgtgggcgcgtgtgtggtccgggacgcgactggcaacatgaacgatactatcatttcagggatgaattgcaacgggagcgccgcgtgcggattgggatacgactttagccggtgtcggcatgaaccctgccagtacggtttgatgaacaatttccaggtgatgtcaatggtgagcggattcggaccgctgataaccgcgggaattttctcagcaaccctgtcgtcggcgctcgccagcttggtcagtgccccaaaggtgttccaagccctgtgcaaggacaacatctacaaggcactgcaattcttcgcaaagggttacggaaagaacaacgaaccgctgcgcggctacatcctgaccttcctgatagcaatggcattcatcttgattgccgaactcaacactatcgcccctattatcagcaacttctttctcgcctcctacgctctcattaacttctcctgtttccacgcctcatacgcgaagagtccgggttggcggcccgcgtatggtatttacaatatgtgggtgtcactcttcggagccgtgctgtgctgtgcggtgatgttcgtaatcaattggtgggccgcagtcattacctacgtcattgaattcttcttgtacgtgtatgtgacctgcaagaagccggatgtgaattggggcagcagcacccaagctctgtcgtacgtgagcgccctggacaatgctttggagctgactaccgtggaagatcatgtgaagaactttcgcccgcagtgcatcgtgctcactggcggaccgatgacgcggccggctctgctggacatcactcacgcgttcactaagaattccgggctgtgcatatgttgcgaggtgttcgtgggcccaaggaagttgtgcgttaaggagatgaatagtggtatggcgaagaagcaggcctggcttatcaagaacaaaatcaaggcgttctacgcggccgtcgccgccgactgcttccgcgatggcgtccgcagcttgctccaagcatccggcctcggcagaatgaagccgaacaccctggtgattggatacaaaaagaactggcgaaaagcccccctgacggagatcgagaattacgtcggtattatccacgatgctttcgactttgaaatcggtgttgtcatcgtaagaatctcccaaggattcgacatctctcaagtcctgcaggtgcaggaggaactggagcgcctggaacaggaacgcttggcgctggaggcaactatcaaagacaatgaatgcgaggaagagtccggaggaatccggggactcttcaagaaggctggaaagctgaacatcactaagactactccgaagaaagatggatctatcaacaccagccaatcaatgcacgtgggtgaattcaatcagaaacttgtcgaagcgagtacccaattcaaaaagaagcaggagaagggaactatcgacgtctggtggctgtttgacgatggcggtcttactctcctcatcccatacatcctcactctccggaaaaagtggaaggattgtaaacttcggatctatgtggggggaaagatcaatagaatcgaagaagaaaagatcgtgatggcctcgctgctgtccaagttccgaattaagttcgcagacatccacatcatcggagatatcaacatccggcctaacaaggaatcatggaaggtttttgaggagatgatcgagccgtataggctgcacgagagctgcaaggatcttactaccgcggaaaagctgaaacgagagactccttggaaaatcactgatgccgagctcgaggcagtgaaagagaaatcatacaggcaggtgcggctcaacgagctgctccaggaacacagcagagcggccaatctgatcgtcctctcactgcctgttgctcgcaaagggtcaatctccgaccttctgtacatggcttggttggagatcctgaccaagaatcttcccccagtgttgctggtgcgcggaaaccacaagaatgtgctgactttttacagc

SEQ ID NO: 251106 - DNA, 3297 bp, synthetic construct
  misc_feature 1..3297: note = Description of Artificial Sequence: Synthetic coding sequence
  source 1..3297: mol_type = other DNA
atgtccctcaacaactcctccaacgtgtttctggactccgtgccgagcaatactaaccgcttccaagtgtctgtgatcaacgaaaaccacgagtcgtcagccgcagccgatgacaacactgaccctccgcactatgaggagacttccttcggtgatgaagcccagaaaaggctgcggatctcgtttcgaccaggtaaccaagagtgctatgacaattttctgcaatccggagagactgccaagaccgacgcttcattccacgcctacgactctcacaccaacacctactacttgcaaacttttggacacaacactatggatgcggtgcccaagatcgaatactacagaaacactggatccatatctggaccgaaggtgaatcgacccagcctcctggagattcacgaacaactggcgaagaacgtcgcggtgaccccgtcgagcgccgatcgggtggctaatggagacggaattccgggcgatgagcaggctgagaacaaagaggacgatcaagcaggggttgtgaagtttggttgggtcaagggcgtgctggtaagatgtatgctgaatatctggggagtgatgctgtttatccgtctgtcgtggatcgtgggcgaagctggaatcgggctcggggtcatcatcatcgggctttcggtagtggtcactactctgactggaatctctatgtctgcaatttgcactaacggagtcgtgagaggcggaggagcttactacctcatctcccgctcgctcggaccagaatttggtggctcgatcggcctcatcttcgccttcgccaacgcggtggctgtggccatgtacgtggtcggatttgccgaaacggtggtggatcttctcaaggaatcggattcaatgatggtggaccctaccaacgacatcagaattatcggctcaatcaccgttgtaatcctcctgggcatctcagtcgccggaatggaatgggaggcaaaagcacaggtcatcctgctcgtcatccttctgatcgccatcgcaaactttttcatcggcaccgttatcccatcgaacaatgaaaagaagtcccgcggattcttcaactaccaggcatcgatcttcgcggagaatttcggcccaaggttcactaagggagaaggattcttttccgtctttgccatcttcttccctgcagccactggaatccttgccggcgcgaacatcagcggcgacctggaggacccacaggatgccatcccacgcgggaccatgcttgcaattttcattaccactgtggcatacctgggtgtggcgatctgtgtcggcgcttgcgtcgtgcgggacgcaaccggaaacatgaacgatactatcatctcgggaatgaattgtaacggaagcgccgcgtgcggcctcggctacgacttctctcgctgtcggcacgaaccttgccagtacggcttgatgaataacttccaggttatgtcgatggtgtccggattcggacccctgatcaccgcgggaatcttctcggcgaccttgtcgtccgcactggcctcgctggtgagtgccccgaaagtgtttcaagccctgtgtaaagacaatatctacaaggccctgcaattcttcgccaaggggtacggaaagaacaacgagccactgagagggtacatcttgaccttcctcatcgccatggccttcatattgatcgctgagctcaacaccattgcaccaatcatctccaacttcttcctggcctcatatgccctcatcaacttcagttgcttccatgcgtcatacgcgaagtcgccgggttggcggccggcctacggtatctacaacatgtgggtgtcgcttttcggtgcggtcctgtgctgcgccgtgatgttcgtcataaactggtgggcggcggtgatcacttacgtgatcgagttctttctctacgtttacgtgacctgtaaaaagccggacgttaactgggggagctcaacccaggccctgagctacgtgtccgcgctggataatgcactcgagttgacgactgtcgaagatcacgtgaagaatttccggccgcagtgcatcgtgcttaccggaggcccgatgaccagaccagctttgctggacattacccacgcgttcacgaagaatagcggactgtgcatctgctgtgaagtgttcgttggtccgcgaaagctgtgcgttaaggagatgaacagtggcatggccaaaaaacaggcctggctcattaagaataagataaaggctttctatgcagccgtcgctgctgactgcttccgcgatggagtccggtcactcttgcaagctagcggactcggaaggatgaagccaaatacgctggtgattgggtacaagaaaaactggcggaaagcacctctgacggagattgagaactacgtggggattattcatgatgcgttcgactttgagataggcgtggtcatcgtgcggatctcacagggattcgacatcagccaggtcctgcaggtgcaagaggagctcgaacgcctcgagcaggagcggctggcccttgaagctacgattaaggataacgaatgcgaagaagaaagcggagggatcaggggcctgttcaagaaagccggcaaattgaatatcaccaaaactaccccgaagaaagacggatcaatcaatacttcacagtccatgcatgtgggtgaattcaatcaaaagctggtcgaagccagcacccagtttaagaagaaacaggaaaaggggacgatcgacgtgtggtggctctttgacgatggagggctgaccctcctcatcccttacatcctcacccttcgcaagaaatggaaagactgcaaattgcggatctacgttggaggaaaaatcaatcgcatcgaagaggaaaagattgtcatggcctccctgctcagcaagttccggattaagttcgcagatattcatatcatcggagacatcaacatcaggcctaacaaagaatcctggaaggtgtttgaggaaatgatcgagccgtaccgcctccatgaaagttgcaaggacctgaccaccgcggaaaagttgaagagagaaactccctggaagatcactgacgcagaactggaagccgtgaaggagaagagctacagacaggtgcgcctgaatgagttgctccaggaacattcacgcgcggctaacctgatcgtgctctccctgcctgtggcgagaaaaggatcaatctcggatcttctttacatggcgtggctggaaatactgaccaagaatctgccgccggtcctgctggtgaggggcaatcacaagaatgtgctcactttctactcc

SEQ ID NO: 251107 - DNA, 3297 bp, synthetic construct
  misc_feature 1..3297: note = Description of Artificial Sequence: Synthetic coding sequence
  source 1..3297: mol_type = other DNA
atgtctctgaataattctagtaacgtgttcttagattctgtccctagcaacacaaaccggtttcaggtttcagtgataaacgagaaccacgagtcgagtgctgcagccgacgataacaccgacccgccacattatgaagaaacatcattcggcgacgaagcacagaaaagactgaggatttcctttagacctggcaaccaagaatgctatgataatttcctacagtccggcgaaactgcaaagaccgacgcgagctttcacgcctacgattcgcacactaacacctactacctgcagaccttcggccacaacacgatggacgccgtgccaaaaatcgaatattatcgtaatacaggatctatttcgggccccaaggtgaaccgcccctcattacttgagatccacgagcagctggctaaaaatgtggcagtgaccccctctagcgccgaccgcgttgctaacggggacggtatacctggggacgagcaagcggaaaacaaagaggacgaccaggccggagtggttaaatttggttgggtaaaaggggttctggtgcggtgtatgctgaatatatggggagtgatgctctttatacgcctcagctggatcgttggagaggcaggcattggcctgggagtcatcatcatcggattatcagtggtcgtaacgacccttacaggcatttccatgtccgccatctgtaccaacggggttgtgaggggcgggggtgcttactatttgatttctcgctcgctgggccctgagttcgggggcagtattggtctaatctttgcctttgccaacgcagttgccgtggcgatgtatgttgtcggttttgcggaaactgtggtcgaccttttaaaagaaagcgactccatgatggttgatccgactaacgatatccggattatagggagcataacggttgttattctgctggggatctccgttgccggcatggaatgggaagcaaaggcccaggtcattttgctggtcattctattaattgctattgctaactttttcattggtaccgtgatacccagcaacaatgaaaaaaagagccgggggttttttaattatcaggcttcaatcttcgccgagaattttggcccacgcttcactaaaggcgaaggttttttttctgtgttcgccatattcttccctgcagcaaccggcattctagccggtgccaacatctcaggagatctggaggatcctcaggacgcaataccccgaggcacaatgctggccatctttataacgacagtcgcgtatttaggcgtggctatctgtgtcggtgcttgcgtggtccgagacgccacaggcaacatgaacgacactatcatcagtggcatgaattgcaatggctcggccgcttgtgggttggggtacgacttttccaggtgtcgccatgaaccatgccagtatggcctgatgaacaatttccaggttatgtctatggtttccggtttcggacctcttatcacggccggaattttctcggccacgctgagcagcgccctcgcttctctggtctctgccccgaaggtcttccaggcactttgcaaggataacatttacaaggccctgcagttttttgccaagggctatggtaagaacaatgaaccgctgaggggatatatcctcacattcctgatcgcgatggccttcattctcatagccgagctcaatacaatagctcctataatcagcaacttctttctcgcgtcttatgccttaatcaatttctcctgttttcatgcgtcttacgccaaatcccccgggtggcgccctgcatacggcatatacaacatgtgggtgagtttgttcggggcggtgttatgctgtgcagtaatgtttgtgataaattggtgggcagccgtaattacctatgtgatcgaattctttctgtacgtgtatgtcacttgcaagaagccagacgtcaactggggatcatcaactcaggctctgtcttatgtctcagccctagataatgccttggagctgactacagtggaggatcatgtgaaaaacttcaggcctcaatgcatagttcttacaggaggaccaatgaccagacctgctctgctggatattacacatgcattcacgaaaaattcggggctttgtatatgctgcgaagtgtttgtaggtccccggaaactctgtgtgaaggagatgaattctgggatggccaaaaagcaggcctggttgattaaaaacaaaatcaaggctttttacgccgcggtggcggctgattgcttcagggatggtgttagaagccttcttcaggcatccggtctgggaagaatgaagccgaacaccctggtgattggatataagaagaattggaggaaagctcccctgaccgagatcgaaaattacgtcggaatcatacacgatgcatttgacttcgagatcggcgtggtgatcgtccgcatatcgcagggcttcgacatctcccaggtcttgcaagtacaggaggagctggaacggcttgagcaggaacggctcgcattggaggccactatcaaggacaatgagtgtgaagaagagtcaggggggatacgagggctttttaaaaaggcaggcaagctgaacattacgaagacaaccccaaagaaggatgggagcatcaatacgtctcagtcgatgcacgtcggtgagtttaaccagaagttggtggaggcatccacccagtttaaaaagaaacaggaaaagggtactattgacgtgtggtggctgtttgacgatggcggattgacgctgctcatcccttacatactgactcttcgcaaaaagtggaaggactgcaaacttcggatctatgtcgggggaaagatcaatcgaatcgaagaagaaaagatcgtgatggcttctcttctttcgaagttccggatcaaatttgctgatatccacatcattggtgacatcaatattaggcccaataaggaatcctggaaggtttttgaggagatgatcgagccatatagactgcatgagagttgtaaggatctgacaactgccgagaaactcaaaagggaaaccccttggaaaataactgatgcggaactcgaagcagtaaaggaaaaaagctaccggcaggtcagactcaacgagctgttacaggagcatagcagagctgcgaatctgatcgttctctccctgccagtagctcgtaaagggagcattagcgacctgctgtacatggcctggcttgagattctgaccaagaacttgccaccggtgctgctcgtgaggggcaaccacaagaacgtgctaactttttactcc

SEQ ID NO: 251108 - DNA, 3297 bp, synthetic construct
  misc_feature 1..3297: note = Description of Artificial Sequence: Synthetic coding sequence
  source 1..3297: mol_type = other DNA
atgtcccttaacaactcctccaacgtctttcttgactcggttccttcgaataccaacaggtttcaggtgtccgtcataaacgaaaatcacgagtcctccgcagcagcagacgacaacaccgacccccctcattacgaagagacttcgtttggtgacgaagctcaaaagaggctcagaatctcatttagaccagggaatcaagaatgttacgacaattttctgcagtcaggtgaaactgcaaagactgatgcctcattccatgcatacgactcacatacgaatacttactatctccaaaccttcggtcacaataccatggatgcagtgccgaaaattgaatactaccggaacaccggaagtattagtggacctaaagtgaacaggccatccctgctggaaatacacgagcaactcgccaaaaatgtggccgtgaccccctcctcagcagatcgtgtcgccaatggggatggcattcccggagatgaacaagcggagaacaaggaagatgatcaagcaggagtggtgaagttcggatgggtcaaaggtgtgctggtcaggtgtatgctgaatatctggggcgtcatgctgttcattaggctttcctggattgtgggagaagccgggattggacttggagtgatcattatcgggctgtcggtggtcgtcacgactctgaccggcatatcgatgtcagccatttgtactaacggagtggtgagaggcggaggtgcgtactacctcatttcacgctcactcgggccagagttcggaggctccatcgggctcatttttgcatttgccaatgcggtcgcagtggccatgtacgtcgtcggttttgcagagactgtggtggatctgcttaaagagtcggacagcatgatggtggatccaaccaacgacatccggataattggatccatcacggtcgtgattcttctcggcatttcagtggcaggtatggagtgggaagccaaggcgcaagtcattcttttggtgattctgcttattgcaatcgcaaactttttcattgggaccgtgatcccttccaacaacgagaagaagagccggggatttttcaactaccaggcatccatattcgccgagaactttgggccgagatttaccaaaggagaaggtttcttttccgtctttgccatcttttttccagcagcaactggaattcttgcaggagccaatatcagcggggacctggaagatccacaggacgccatcccgcgtggtaccatgcttgccatattcattacgactgtggcgtacctgggggttgcaatctgtgtgggtgcatgtgtggtgcgcgatgcaaccggaaatatgaatgataccatcatctcgggtatgaactgtaatgggagcgcagcatgtggcctgggatacgattttagccgatgccggcatgaaccctgtcagtatgggctcatgaacaattttcaggttatgtcgatggtgtcgggtttcggcccactgatcaccgcaggaatcttctccgccaccctttcgtccgctcttgcatcgctcgtgtcagctcctaaagtgtttcaagctctctgcaaggacaacatctacaaggcgctgcagttctttgctaaggggtacggcaagaacaacgaaccactcagggggtacattctgacttttctgattgcaatggctttcattttgattgcagaactgaacaccattgctcctatcatctctaactttttcctggcaagctacgcactcattaacttctcgtgttttcacgcatcctacgcaaaatcgccgggatggaggcctgcgtacggtatctacaacatgtgggtcagcttgttcggggcagtcctttgttgtgcggtcatgtttgtcattaactggtgggccgcagtgattacttacgtcattgaattcttcctttatgtgtacgtgacttgcaaaaagcctgacgtaaattggggatcgtcaactcaagctctcagctacgtgagcgcacttgacaacgcccttgaactgacgaccgtcgaagatcacgtcaaaaacttcagaccccaatgtattgtgcttaccgggggaccgatgactcgacccgccttgttggacatcactcacgcatttaccaagaattcagggctttgcatttgttgcgaagttttcgtcggaccgaggaagctgtgtgtgaaggaaatgaactcgggaatggcgaagaagcaagcgtggttgattaagaacaagattaaggccttttacgctgcggtggcagccgactgtttccgcgatggagtccgttctctgctgcaggcttcaggtttgggacgcatgaaacctaataccctcgtcattggttacaaaaagaactggcgaaaggcacctttgactgagattgagaattacgtcggtataatccacgatgcatttgactttgagattggggtcgtcatcgtgcgaatatcccagggatttgacattagccaggtgcttcaagtccaggaggagttggaaagactggagcaggagaggcttgcacttgaagcaacgattaaggacaacgaatgcgaagaagagtcgggcggcatccggggtcttttcaagaaggcaggaaaacttaacattaccaaaaccactccaaaaaaggatggtagcatcaacaccagccagtccatgcacgtgggagagtttaatcagaagctggtcgaagcatcaactcagtttaagaagaagcaagagaaggggaccattgatgtctggtggctctttgatgatggaggattgacccttctgatcccatacatcctcactctgcgcaagaagtggaaggattgcaaattgagaatttacgtgggtggaaagattaaccgcatcgaagaagaaaagatagtgatggcaagcctcctctcaaagtttagaatcaaatttgcggacattcacattatcggagatatcaacattcgcccaaataaggaatcatggaaggtgtttgaagagatgattgaaccgtacaggcttcatgagtcctgcaaggatcttactactgcagaaaaacttaaacgtgaaaccccgtggaagattactgatgccgaacttgaggcagtcaaagagaagtcctaccgacaggtcagactgaatgaactgcttcaagaacactcgcgcgcggcgaacttgattgtgctgtctctgccagtcgcacgaaaagggtccatcagcgatcttctgtacatggcatggcttgaaatcctgaccaaaaatctccctcccgtgttgctcgtcagaggtaatcataagaacgtcctcaccttttacagc

SEQ ID NO: 251109 - DNA, 3297 bp, synthetic construct
  misc_feature 1..3297: note = Description of Artificial Sequence: Synthetic coding sequence
  source 1..3297: mol_type = other DNA
atgagtctgaataattcgagcaacgttttcttggattctgtgccgtctaacactaaccgtttccaggtgagcgtcattaacgaaaatcacgagagcagcgcggctgctgacgataatacagatccgccgcattatgaagaaacgtctttcggcgacgaagcacagaagcgcttgcgcatctcttttcggccggggaatcaagaatgctatgataattttctgcaatccggtgagaccgcaaaaacagatgctagcttccatgcttatgatagccacaccaatacttactatcttcaaacgtttggtcataacacgatggacgcggttcctaagattgagtattatcgaaacacgggaagcattagtgggccaaaggtgaaccgtcctagcctcctagagatccacgagcagctggcaaagaacgtcgcggtcaccccatcctccgccgaccgtgtcgctaatggcgatggcattccaggcgatgagcaagccgagaacaaggaggatgaccaagccggagtggttaaattcggctgggtaaagggggtcctagttcgttgtatgctgaacatttggggggtgatgttattcattcgtctgtcctggatagtcggcgaggcgggcattgggcttggcgtgatcattattggcttgagcgtagttgtgaccaccctgaccggcatcagcatgagcgctatttgtactaacggtgttgtgcgtggtgggggtgcctattacctgatctcccgttccctgggtcctgagttcggcggcagcataggcctgattttcgcgtttgccaacgctgtggcggtcgcaatgtatgttgtcggttttgcggagaccgtagtggatctgcttaaggaatctgactccatgatggtcgacccgaccaatgacatccgtattattggtagcattaccgttgttattctgttaggcattagcgtcgcggggatggaatgggaggcgaaggcacaggtcattctgttggtcatcctgctgatcgctatcgccaatttctttattggtacggttatcccgtcaaacaatgagaagaaaagcaggggcttttttaactaccaagcaagcatatttgcggagaactttggaccccgttttactaagggagagggctttttcagcgtgtttgccattttcttccccgcggctaccggtatcttggcgggcgccaatatatccggcgatctggaagacccacaggacgcaatcccccgaggaaccatgctggcgatctttataacgaccgttgcttacctaggtgttgcgatttgtgtgggtgcctgtgtggtgcgcgatgctacggggaatatgaacgataccatcatttccggcatgaactgtaacggctcggcagcgtgcggcctaggttacgacttcagccgctgtcgtcacgaaccatgtcagtacggtttgatgaacaacttccaggtgatgagcatggtgagtggtttcggcccactcataacggcaggcattttctccgctactctgagcagcgccctggcgtcactggttagcgcaccaaaggtgttccaggcactgtgcaaagataacatctacaaggccctgcagttcttcgccaaaggttacggcaagaacaatgagccactgcgcggttatatactaactttcctgattgccatggcattcatcttaattgcggaactcaataccattgccccaatcataagcaatttctttctggcgagctacgctctgattaatttctcctgtttccacgcatcttacgcgaagtcccccggctggcgcccagcgtacggtatttataatatgtgggtttccctgttcggtgcggtgctgtgttgtgctgtgatgtttgttataaactggtgggcggcagtcattacctacgtcatcgagttttttttatacgtctacgttacctgcaagaagcctgacgttaattgggggagctctacgcaagcgctgtcgtatgtgagcgccttggacaatgcattggaactgacgaccgtcgaggatcacgtgaagaatttccgtcctcaatgcattgtgttaactggtggtccaatgacccgacctgctctgctggacatcacccatgcctttactaagaattctggtctgtgtatttgctgcgaggttttcgttggtccccgcaaactgtgtgtgaaggagatgaacagcggtatggccaagaaacaggcttggctgattaaaaataaaattaaagccttttacgcagcggtggcggcggactgctttagagatggcgtgcgcagcttgctgcaagcctctggcttgggacgaatgaagcctaacactctggttattggctacaaaaaaaattggcgcaaggctcccctgaccgagattgaaaactatgtcggaatcattcatgatgcgttcgatttcgaaataggagtcgtgatcgtccgtatctcccaaggttttgacatttcccaagtgctgcaagtgcaggaggagttggagagattggagcaggagcgcttggcgctggaggcgactatcaaagataatgaatgcgaggaagaatccggtggaatccgcggtctgttcaagaaggcggggaagctgaatatcaccaaaaccacacctaaaaaagatggaagcatcaacacctctcagtccatgcacgttggtgagtttaaccagaagttggtggaggcgtcaacgcagtttaagaagaaacaggagaaaggtaccattgacgtctggtggttgtttgatgatggcggcttgactttactgatcccgtacatcctgactttgaggaagaagtggaaggattgtaagctgaggatctatgtcgggggcaaaataaaccgcatagaagaagagaagatcgtgatggccagcctgctgtctaagttccgtattaaatttgccgatatccatataatcggcgacatcaacatcagaccgaacaaggagtcctggaaagtattcgaggagatgattgaaccataccgcctgcacgaatcctgtaaggatctgacaaccgcagaaaagctgaaacgagaaaccccttggaagatcactgatgcggagctggaggcagttaaagagaagagctatcgccaggttaggttaaatgagctgctgcaggagcattctcgcgccgccaacttgattgtcctgagcctgcctgttgcgcggaaggggagcatctccgatctgctgtacatggcttggctggaaattttgacgaagaacttgccaccggttctgctggttagaggcaaccacaagaacgtcctgaccttctatagc

SEQ ID NO: 251110 - DNA, 3297 bp, synthetic construct
  misc_feature 1..3297: note = Description of Artificial Sequence: Synthetic coding sequence
  source 1..3297: mol_type = other DNA
atgagtctcaacaacagctcaaacgtgtttctggactccgttccaagcaataccaatcgattccaagtgagcgtgataaacgagaatcatgaatcatcagccgccgcagacgataacacagaccctccgcactacgaggaaacgagctttggcgacgaagcccagaaacggctccggatcagcttcagaccaggaaaccaggaatgttatgacaatttcttacagagtggagagacagctaagacggatgccagcttccatgcttatgatagtcatacgaacacctactacctccaaacttttggacacaatacaatggacgctgtccctaaaattgaatattaccgcaatacaggctccatctcaggcccaaaagttaatcggccaagccttctcgaaatccatgaacagctcgccaagaacgtcgccgtaacaccatcaagtgcagacagggtcgccaatggcgatggtattcccggagatgaacaggcagaaaataaggaagatgatcaggctggagtggtgaaattcggttgggtaaaaggcgtactcgtgcggtgcatgctcaatatatggggcgtcatgctgtttatccggctatcatggattgtgggtgaggcagggattggcctgggcgtgataatcatagggctgtccgtggtggtgacaaccctgacaggcatatccatgtccgcgatatgcacaaatggagtcgtgcggggcggaggagcatactacctgatttcccggtcgctcggacccgaatttggcggaagcatcggtctcatatttgcctttgccaacgctgtagccgttgccatgtacgtggtgggcttcgcagagactgttgtggatctgttgaaagaatctgatagtatgatggtggaccccacaaatgacatccggattatcggttcaatcactgtggtcatcttactgggcatttcagtggcaggaatggagtgggaagccaaggcccaggtgattctgctcgtgattctcctgatcgccattgcaaatttttttattgggacggtgatccccagcaacaatgagaaaaagtctcgcggtttttttaactaccaggctagcatcttcgctgaaaactttggtccacgcttcaccaaaggagagggttttttctccgtgttcgccatcttcttccccgccgctaccgggattctcgccggagcgaacatttccggcgatttggaggacccacaagacgcaatcccacgagggactatgctggccatatttatcacaaccgtcgcttacttgggggtggccatctgtgttggagcctgcgtagtgcgcgacgcaactggcaacatgaacgacacaatcatcagtggaatgaattgcaatggtagtgccgcttgtggactgggctacgacttttctcgctgccggcatgaaccttgccagtatggcttaatgaataacttccaggttatgagtatggtgtccggttttggcccactcattactgcaggcatcttttctgcgaccctcagctcagcactggcaagccttgtgtccgcccccaaggtgtttcaggccctgtgcaaggataatatttataaagcattgcagttcttcgccaagggctatgggaagaataatgaacctctcagaggctatattctaacgtttctgatcgctatggcatttattctgattgcagagctgaataccattgcccccatcatcagtaactttttccttgcctcttacgcgttgataaatttctcttgctttcacgcgagttacgccaaatcccccgggtggagacctgcctatggtatttataatatgtgggtttcgctgttcggggctgtactgtgctgtgctgtgatgtttgtgatcaattggtgggcagcagttattacttacgtcatagagttctttctttacgtatacgttacctgcaaaaagcctgacgtgaattgggggagctccacacaggccctgtcctacgtcagcgcacttgataacgcgctggaactgaccaccgtggaagaccatgtaaaaaactttcggcctcaatgtattgtacttaccggggggcctatgactcggcctgctcttcttgacattacccacgcttttacaaaaaactcaggactatgcatctgttgcgaggtatttgttggcccccgtaagctctgcgtgaaggaaatgaactctgggatggctaaaaagcaggcctggctgatcaaaaataaaatcaaggcattctatgctgctgtggctgcagactgcttccgggatggtgtgcgttcactcctgcaagcatctggcctaggcagaatgaagccaaataccctggtcattggctataagaaaaactggcgaaaggcgccactgactgagattgaaaattatgtgggaattatccacgacgcatttgacttcgaaattggcgtcgtgatcgttcgaatctctcagggatttgacatctctcaggtgctgcaggttcaggaggagttggagcgcctcgagcaggagaggctcgctctcgaagcaaccatcaaggacaatgagtgcgaggaggaaagcggagggatccgggggcttttcaagaaagccgggaaattaaatataaccaagaccacaccaaaaaaggacggttccataaatacctctcagagcatgcacgttggagaatttaaccagaaactggtggaagccagcacgcaatttaaaaaaaagcaggagaaaggtaccattgacgtctggtggctgttcgatgatgggggtcttactctgttgattccctatatcctgaccctccgcaaaaagtggaaggactgcaaattacggatatacgtaggggggaagatcaacagaattgaggaggagaagatcgtgatggcttctttgctgagcaaattccgcatcaagtttgcggacatacatatcatcggtgatattaacattcggcccaacaaggagagttggaaagtcttcgaggagatgatagaaccatataggctgcatgaatcttgtaaggatcttaccacagctgagaagctgaaaagagaaactccatggaaaattacagatgccgagctcgaggccgttaaggaaaaatcttaccgacaggtcaggctgaacgaactgctgcaggaacactctcgcgccgccaacttgattgtcctatctttacccgtcgcacggaaggggtcgatttctgatctcctttacatggcatggcttgaaattcttactaaaaacctgccaccggtgctactggttagagggaatcataaaaacgttcttaccttctactca

SEQ ID NO: 251111 - DNA, 3297 bp, synthetic construct
  misc_feature 1..3297: note = Description of Artificial Sequence: Synthetic coding sequence
  source 1..3297: mol_type = other DNA
atgagtttgaacaactcatcaaatgtctttttggattccgtaccctccaacacaaatagattccaggtgtcagtgataaacgaaaaccatgagtcaagcgccgccgcagatgataacaccgatccaccccattatgaagaaacctctttcggggatgaggcccagaagaggcttagaatctctttccgccctggtaaccaggagtgttacgacaattttcttcagtccggagaaacagctaaaacggacgcttcatttcatgcctacgatagtcataccaacacttattacctgcaaactttcgggcacaatactatggatgcagtgcccaagattgaatattataggaacactgggagcatcagtggacccaaggtcaacaggccatccctgctcgaaatccatgagcagttggccaaaaacgtagctgtgacaccctccagcgccgatagggttgccaacggcgatgggatcccaggagacgagcaggccgaaaacaaggaggatgatcaggcaggtgttgtgaagttcgggtgggtgaaaggggtgctggtccgctgtatgctgaacatttggggggtgatgctcttcataagactgagttggattgtgggtgaggctggtatcggactgggagtgattattatcgggctgagtgtggtagtgactacccttaccgggataagtatgtccgcgatatgcacaaacggagttgtgagaggagggggcgcttactatttgatcagcagatccctcgggccagaattcggcggctccatcgggctgattttcgcgttcgccaatgccgtggccgtagccatgtacgttgtgggtttcgcagagactgtggtagacctgctcaaagagtccgactctatgatggttgacccgacgaatgatatccgcatcatcggcagtattacagtggtcatcctgctggggatctccgtggccggaatggagtgggaggcaaaggcgcaagtgattcttctggtgattctgcttattgcaattgcaaactttttcattggtactgtcatcccctctaacaacgagaagaagagccgcggtttcttcaattaccaggcttcaattttcgcagaaaacttcggccctaggttcaccaagggcgaggggttcttcagcgtgtttgctattttctttccagctgctaccggaattctggcgggcgccaatatctctggcgatttggaagaccctcaggacgccattcctaggggtactatgctggctatcttcattaccactgtggcttatctcggggtagccatctgtgttggggcgtgcgtcgtgcgcgacgccactggcaatatgaatgacactatcatctccggcatgaattgtaatgggtcagccgcgtgcgggcttgggtatgacttcagtagatgcaggcacgagccttgccaatacggactgatgaacaacttccaggtgatgtcaatggtctccggcttcggcccactcataacggctggcatattcagcgcaacgctgagcagcgctcttgcttccctcgtgtcagctcccaaagtgttccaagccttgtgcaaagataatatttataaagcgctgcaattttttgcaaagggatatgggaaaaacaatgaaccccttagggggtacatattgacattcctgatcgcaatggcctttatcctcattgcggaactcaacaccatcgccccgattatctccaatttcttcctcgcctcctacgccctgatcaatttcagctgctttcatgccagctacgctaaatcccctggctggagacccgcctatggcatctataatatgtgggtgtcacttttcggcgcagtcctgtgctgcgccgtcatgttcgtgatcaattggtgggccgccgtgattacatatgtgatagagttttttctctacgtctatgtgacctgcaaaaagccagatgttaactggggatcaagtacccaagccctttcatacgtgagtgccctcgataatgccctcgaactgactaccgtggaggatcatgtcaagaacttccgcccccagtgtatcgtcctcacaggaggcccaatgaccagacctgcactcttggatattacacatgcttttaccaaaaactccggactctgtatatgttgcgaggtgtttgttggaccccgaaaactgtgtgtgaaggagatgaatagcgggatggctaagaagcaagcgtggctcatcaagaacaagatcaaggctttctacgcagcagtggctgcagactgttttcgagacggtgtgcggtccctcctgcaagcttctgggctgggccgcatgaagccaaacacactggtgattgggtacaagaagaactggaggaaggcaccactgacagagattgagaactatgttgggattatccacgacgcgttcgatttcgagattggcgtagtgatagtccggatcagtcagggttttgatatttcccaagtgctgcaagtccaggaggagttggagcggttggaacaagagcgacttgccctggaagccacgattaaagacaatgagtgtgaggaggaatcaggggggattcgaggactgtttaaaaaagccggaaaattgaacatcacaaaaaccacacccaaaaaagacggatccatcaacacttctcagtcaatgcatgtgggggagttcaaccagaagctggttgaggcctcaactcagttcaagaagaaacaggagaaaggcactattgacgtttggtggctgttcgacgatggagggcttacccttctcatcccttatatcctgaccctgaggaagaagtggaaggattgcaaactccggatatatgtgggagggaagatcaaccgaattgaggaggagaagatagtgatggcaagcctcctctccaaatttcgaataaagtttgcagacatccatattatcggtgacataaacatccgcccaaacaaagagagctggaaggtgtttgaggagatgatcgagccctaccggctccacgagtcatgtaaagacctgactactgccgaaaagctcaagagggaaaccccctggaagataaccgatgctgagcttgaggctgtgaaggagaaaagttaccggcaagtccgcctgaacgaacttctgcaggagcacagtagagcagccaatctcatcgtgctctccctgcctgtggccagaaagggctccatctctgatctcctgtacatggcgtggctggagatattgaccaaaaatcttccacctgtgctgttggtgagaggaaaccacaagaacgtccttactttctatagt

SEQ ID NO: 251112 - DNA, 3297 bp, synthetic construct
  misc_feature 1..3297: note = Description of Artificial Sequence: Synthetic coding sequence
  source 1..3297: mol_type = other DNA
atgagcttgaacaacagcagtaatgtgttcctcgactcagttccatccaacacaaaccgttttcaggtatcagtgatcaacgaaaaccatgagtcttccgccgccgctgatgataataccgaccctccccattatgaagaaacctccttcggggacgaagcccaaaaacggctcagaatttcttttcggcctggcaaccaggaatgttacgataacttcctccagtctggtgagacagccaaaacggatgcgagtttccacgcctatgacagccataccaacacatattatttgcagacattcggtcacaataccatggatgccgtacctaagatcgaatattatcggaataccggtagcatttcgggcccaaaggtgaataggccatcactgttggaaatccacgaacagctggccaagaacgtggccgttactccctccagtgctgaccgcgtggcaaacggagacgggatacccggggatgaacaggccgaaaacaaagaggatgatcaggcaggtgtagttaagtttggctgggttaagggagttttagtgcgatgtatgctcaacatctggggggtcatgctgtttataaggttgtcatggattgtaggagaggccggcattggccttggggtgattattatcggcctttcagtggtcgtgaccactctgaccggtatctccatgtctgcaatctgcactaatggtgtggtgagaggtggcggagcatattatctgatcagtaggagcctcggacccgaattcggaggctccatcggcttgatcttcgcatttgccaatgcggtcgccgtggccatgtatgtggttgggttcgctgagaccgtggtggatctgcttaaggaaagtgatagtatgatggttgatcccacaaacgatatccgcatcatagggtccattactgtagtgatcctgttgggaatctccgtcgccggcatggaatgggaggccaaggcccaagttatcctgctcgtgatcctgctgatcgccattgctaacttcttcatcggaaccgtgatacccagtaacaatgaaaaaaagagtcggggtttttttaattatcaggcttctatatttgcagagaattttggccctcggttcacgaagggcgagggctttttcagcgtgtttgccatttttttcccagctgcaaccgggatccttgcaggagctaacatttctggcgatttggaggaccctcaagatgcgataccacggggtactatgttggccatcttcattactacagtggcctacttaggagtggccatttgcgtgggtgcttgtgtggtgcgggacgctacggggaatatgaatgatacaattatttcagggatgaattgcaacggttccgcagcctgtgggctcgggtacgatttttctaggtgtcgacacgagccctgtcaatacggactgatgaataactttcaggttatgtccatggtgtcgggattcgggccccttatcaccgccggaatattctccgccaccctatcgagtgccctagcgtccttggtttcagcacctaaggtattccaagccctgtgtaaggataacatctataaagctttgcagtttttcgccaagggttacgggaagaataatgagccccttcggggttacattctaacattcttgatcgccatggccttcatactcattgcggaacttaacacaattgctccaattatatctaacttctttctggcctcatatgccctaatcaacttttcttgtttccatgcatcatacgctaagagcccaggctggcgcccggcctacgggatctataatatgtgggtgtctctgtttggagccgtcttatgctgtgcagtaatgttcgtcataaattggtgggctgcagtgataacctacgtgattgagttcttcctatatgtctatgttacttgcaaaaagcccgacgtaaactggggtagttccacccaggctctatcatacgtgtcagcactcgataatgccttggagctgacaacggtggaagaccacgtgaagaattttagacctcagtgcatagtccttactggaggtcccatgaccaggcccgccctgctggacattactcatgcattcaccaaaaacagtggtctctgcatctgttgcgaagtcttcgttggacccaggaagttgtgcgtaaaagaaatgaattctggtatggccaagaaacaggcctggctgattaagaacaaaatcaaagctttctacgcggcagttgcagccgactgttttcgcgacggggttcgctccctgctccaggcttcaggcctgggtcggatgaagcccaatacactcgtgattggatacaaaaagaactggaggaaagccccccttaccgagattgagaactacgtgggtatcatccacgatgctttcgatttcgaaattggagtcgtcatagtccgtatctctcagggcttcgacatctcacaggtgctccaggttcaggaagagttggaaagactagagcaagagagactggcgttggaagctacaatcaaagataatgaatgcgaggaggagtcagggggtattagagggctgttcaagaaggccgggaaattaaacattaccaagacaactcccaaaaaagatggaagtattaacacgtcccagtcaatgcacgtgggggagtttaatcaaaagttggtggaagcctctacccagtttaagaagaagcaggagaaggggacgatcgacgtgtggtggctgtttgacgacggagggctcacgttgctgatcccttacatattgacacttaggaagaaatggaaagattgcaaactgcgaatttacgtcggcggcaagattaataggattgaagaagaaaagatcgtaatggcatctttgcttagcaaatttcgaattaaattcgcagatatccatatcatcggcgacataaatatcaggccaaacaaggagagctggaaggtatttgaagagatgatcgagccctatagactccacgagagctgcaaagatctgacaaccgcagaaaaactaaagcgcgagacaccatggaaaatcaccgacgccgaactggaggctgtgaaagaaaaatcctaccgccaggtgaggctgaacgaactgctgcaggaacactcccgcgctgctaacctgattgtgctgtcccttccagtcgcgagaaaaggatctatatctgacctgctttacatggcgtggctggaaatcttaactaaaaatttaccacccgtactactcgtgcgaggcaatcacaagaacgtactgacgttctactct

SEQ ID NO: 251113 - DNA, 3297 bp, synthetic construct
  misc_feature 1..3297: note = Description of Artificial Sequence: Synthetic coding sequence
  source 1..3297: mol_type = other DNA
atgtccctgaataactcctcaaacgtgtttcttgatagcgtgccttcgaacactaaccgttttcaagtctccgtcataaacgagaaccacgaatcatctgctgcagcggatgataatactgatcctcctcactacgaagagactagctttggtgatgaagctcagaagagactgcgcatctcctttcgtccaggtaaccaggaatgttatgataactttctgcaatcgggcgagactgccaaaaccgacgccagctttcatgcgtacgattcccacaccaacacctactaccttcagacctttgggcataataccatggacgctgtcccgaaaattgagtactaccggaataccggcagcatttcgggaccaaaggtgaatcggccaagcctccttgagatccatgagcaactcgcaaagaacgtggctgtgacccctagctccgcggaccgcgtggctaatggagacggcatccctggagacgaacaagcagaaaacaaggaggacgatcaagccggtgtggtcaagttcggatgggtcaagggcgtcctggtgcgctgtatgctgaacatatggggagtgatgctgttcattcgcctttcgtggattgtcggtgaagccggtattggtctgggtgtgatcattattgggcttagcgtggtcgtcaccaccctcaccggaatttcgatgtcagcgatttgtaccaatggtgtggtcaggggtggtggagcgtactaccttatctcccggagccttgggcctgagtttgggggttcgattggcctgattttcgccttcgctaacgctgtggcggtggcaatgtacgtcgtgggatttgccgaaactgtggtggatcttctgaaggaatcggattccatgatggtggatccaaccaacgatatacgaatcattggatccattactgtcgtgattctcctcggaatatccgtggccggtatggagtgggaagcaaaagcacaggtcatactgctcgtgatactcctcatcgcaatcgcaaacttctttattggcactgtgattccaagcaacaacgagaagaaatctcgcggatttttcaattaccaggcctcgatatttgccgagaactttggacccagatttacgaagggtgaaggcttcttcagcgtgtttgcaatctttttcccagcagcaaccggtatactggcaggagcgaacattagcggcgacctcgaggatccgcaggatgcgattccccgcggcaccatgctggccatattcataaccactgttgcataccttggtgtggcaatatgtgtgggagcatgcgtggttagagatgcaactggaaacatgaatgatactatcatttcaggcatgaattgcaatgggtcggctgcgtgtggccttgggtacgacttttcgagatgtagacatgagccctgtcagtacgggcttatgaacaactttcaggtgatgtcgatggtttcaggttttggaccgctcattacggcaggaattttctcggctactctgtcgtccgcattggcatcgctcgtctcagctcctaaggtgtttcaagccttgtgtaaagacaacatttacaaagccttgcagttttttgccaagggctacggaaaaaacaacgaacccctgagaggctatatccttacctttctgatcgcaatggcattcattctcatagcagaattgaatactatagccccaattatctcgaatttctttctggcatcatacgcattgattaacttttcgtgttttcatgcatcctacgcaaagtcgccaggatggcgaccagcatacggaatctacaatatgtgggtgtcgctgtttggtgcggtcctttgctgcgcagtcatgtttgtcatcaattggtgggcagcagtcattacttacgttatcgagttctttctgtacgtgtatgttacttgtaagaagcctgatgtgaattggggatcttcgactcaggcactgagctacgtctcagcccttgacaacgctctcgaacttactactgtggaggatcatgtcaagaattttcgcccccaatgtattgtcctgacggggggcccgatgacccgcccagctcttttggatataacccacgcatttactaaaaactcaggactgtgtatttgctgcgaggtgtttgtggggcctcgcaagctgtgcgtcaaggagatgaattcgggtatggctaagaagcaagcatggcttatcaagaacaagattaaggcattctacgcagcagtggcagcagattgctttcgagacggtgtacgatcacttcttcaagcatcaggtcttggcaggatgaagcctaatactctggtgattggatacaaaaagaactggcggaaggcccctctcactgaaatcgagaattacgtggggataatacacgatgcctttgatttcgaaattggagtcgtgatagtgcgcatttcccaaggattcgatatttcgcaagtgcttcaagtgcaggaggaactcgaaagacttgaacaagaaaggctcgcactcgaagctaccatcaaggacaacgaatgtgaggaagagtcaggtggaattcgcggcctgtttaagaaggcaggcaaacttaacataaccaagaccacgcctaagaaggatggctccattaacactagccaaagcatgcacgtcggtgaattcaatcaaaagctggtggaagcgtccacgcaattcaaaaagaaacaagagaagggtaccatcgatgtgtggtggcttttcgacgatggtggtctgactctgcttattccttacattctgacccttaggaaaaagtggaaggactgtaagctgcgcatttatgtgggcggtaagattaacagaatagaagaagaaaagatagtgatggcgagcttgctttccaagtttagaataaagttcgcagatattcatatcattggggatatcaatatccggcctaacaaagagagctggaaggtgtttgaagaaatgattgagccgtatcgactgcatgaatcctgcaaggatttgaccaccgcagaaaagctcaagagagaaactccttggaagataactgatgcagaactggaggcagtgaaggaaaaatcctaccggcaggtcaggcttaatgaacttttgcaagagcattcaagagcggctaaccttattgtcctttcgcttcctgtggctcgcaaaggatccatatcggacctcctgtacatggcatggctggaaatactgaccaaaaatctgcctccggtgctgcttgtgagaggcaaccacaagaacgtcctcactttctactcc

SEQ ID NO: 251114 - DNA, 3297 bp, synthetic construct
  misc_feature 1..3297: note = Description of Artificial Sequence: Synthetic coding sequence
  source 1..3297: mol_type = other DNA
atgagcctcaacaattcctccaatgtgttcctggactccgtgccgagcaacactaataggttccaggtgtcggtgatcaatgaaaatcatgagagcagcgccgcggcagacgacaatacggatccaccacattacgaggaaacttcattcggcgatgaggcgcagaagagattgcgcatctcctttcggcctggaaaccaggaatgctacgataacttcctgcaatcgggtgaaactgccaaaaccgatgcctcgttccacgcgtacgactcccacaccaacacttactatctgcagacttttggacacaataccatggacgcggtgccaaagattgaatactacagaaacaccggctctatttcaggcccgaaggtgaatagaccgtccctcctcgaaatccatgagcagctggccaagaatgtcgcggtgaccccgtcgtcggccgatcgggtcgccaacggggacggaatcccgggagatgaacaggccgagaacaaagaggatgaccaggccggagtcgtgaagttcggttgggtgaaaggagtgctggtgcgatgcatgctcaatatctggggagtcatgctgttcatcagactgtcgtggattgtgggagaagcgggaattggcctgggtgttatcatcatcggcctgagcgttgtggtcaccacccttactgggatctccatgtccgcaatctgcacgaatggagtggtcagaggaggtggagcctactacttgatttcgcgctcactggggcccgaattcggagggtctatcggactgatcttcgcctttgccaatgcggtcgccgtcgcgatgtacgtggtgggttttgctgaaactgttgtcgatttgctcaaagagtcagattccatgatggtggaccccactaatgatatccggatcatcggaagcatcaccgtggtgatcctgctcggcatctcagtcgccggaatggaatgggaggccaaggcccaggtgatcctcttggtgatccttctcattgcgatcgccaacttctttattggcaccgtgatcccatctaacaatgagaagaaatcgcgcggattcttcaactaccaggcatcaatcttcgcagaaaacttcggaccacgcttcaccaagggagaaggattcttcagcgtgtttgcaatctttttccccgcggccaccggtatcctcgcaggtgccaacatctcaggggacctggaggatccccaagatgccattcctcgagggactatgctggcgatcttcatcactactgtggcctacctgggagtcgccatctgcgtcggagcttgcgtggtcagggacgctacgggaaatatgaatgacactatcatctccggcatgaactgcaacggctccgccgcatgcggactgggatacgacttttcaaggtgtcggcacgagccatgtcagtatggactgatgaacaattttcaggtcatgagcatggtgtccggattcgggcctctgatcaccgcaggaatcttctcggccaccctgtcgagcgccctggcctcactcgtctcagcgccaaaagtgtttcaagcgctgtgcaaagacaacatctacaaagccctgcagttcttcgccaagggctatggaaagaataacgaaccactccgcggatacatcctcacttttcttatcgccatggcttttatcctgatagcagaacttaacactatcgcgccaatcatctcgaatttcttcctggcctcatacgcgctgatcaatttctcgtgcttccacgcatcttacgccaagagccctggctggaggccggcgtacgggatctacaatatgtgggtttcccttttcggcgccgtcctgtgctgcgccgtgatgttcgtgatcaactggtgggccgccgtgatcacctacgtgatcgaattcttcttgtacgtttacgtgacttgtaagaaaccggacgtcaactggggctcgagcacccaagccttgtcctacgtgagcgctcttgataacgcccttgagcttaccaccgtcgaagatcacgtgaagaactttcgacctcagtgcatcgtgctgaccgggggaccgatgactcgcccagctctgctcgacatcacccacgcattcaccaagaattccggattgtgtatctgctgtgaggtgttcgtgggaccgagaaagctgtgcgtgaaagaaatgaatagcggaatggccaaaaagcaggcgtggctcattaagaacaaaatcaaggcgttttacgcagccgtggctgcggactgcttccgcgatggagtccggtcgctgctccaggccagcgggctggggaggatgaaaccgaacacccttgtgatcggatataagaagaactggcgcaaggccccgctgaccgagatcgaaaactatgtcggaatcatccacgacgccttcgacttcgaaattggggttgtcatcgtgcgtatctctcaaggcttcgacatctcccaggttctgcaagtgcaagaagagctggagagactcgaacaggaacggctcgcccttgaggcaacgatcaaggacaatgaatgtgaagaagagtcgggtggaatcagagggctcttcaaaaaggccggcaagttgaacatcactaagactacgcccaagaaggacggatcgatcaacacgagtcagagcatgcacgtgggagaattcaaccaaaaactggtggaagcgtcaacccaattcaaaaagaagcaggagaaggggaccatcgacgtgtggtggctgttcgatgacggtggcctcactcttctcatcccgtacatcctgactcttcgcaagaaatggaaggactgtaagctgcggatctacgtgggcggcaaaatcaacagaattgaggaagagaagatcgtgatggctagcttgctctcaaagtttcgcatcaaattcgcggacatccacatcattggtgatatcaacatccgcccaaacaaggagtcgtggaaggtgttcgaggagatgattgaaccttaccgcctccacgaaagctgcaaggacctgacgactgccgagaagctgaagcgggaaacgccgtggaagatcactgacgctgagctcgaagccgtcaaagaaaaatcctacagacaggtccgcctgaacgaattgcttcaagaacactcccgggcagcaaacctcatcgtgctgtccctcccagtggctagaaaggggtcgatcagcgacctgctgtatatggcctggctcgaaatcctcaccaagaacctccctcctgtgctcctggtgcggggaaaccacaaaaacgtcctcactttctacagc

SEQ ID NO: 251115 - DNA, 3297 bp, synthetic construct
  misc_feature 1..3297: note = Description of Artificial Sequence: Synthetic coding sequence
  source 1..3297: mol_type = other DNA
atgtctctgaacaattccagcaacgtcttccttgactccgtgcctagcaacacaaaccgcttccaagtgtccgtcatcaatgagaatcatgaatcctccgccgctgccgatgacaacactgaccccccgcactacgaggagactagcttcggcgacgaggcccaaaagcgtttgcggattagcttccgacctggcaatcaagagtgttatgataactttcttcaatccggcgagacggctaagaccgatgccagcttccatgcctacgattctcacactaatacctattacctgcagacattcggccacaacacgatggatgctgtgccgaagatcgagtactaccgcaacacgggttccatctctggccccaaggttaatcgcccttcccttcttgagatccacgagcagcttgccaagaacgttgcggtaactccttcgtccgccgaccgcgtggctaacggggacggcatccctggggacgagcaggcggagaataaggaggacgatcaggccggcgtcgtaaagttcggctgggttaagggcgttctggtgaggtgtatgctgaacatctggggcgttatgttgttcatacgcctgtcctggatcgtgggggaggccggcatcggtctgggcgtcattatcatcggtctgtccgtcgtcgtcacaacccttaccggcatctccatgtccgcgatctgcacgaacggggtggtgcgcggtggaggtgcctactaccttatcagccgttccctcggcccggaattcggaggctctatcggcctgattttcgcctttgcgaacgcggtggccgtcgctatgtatgtggtcggtttcgcagaaaccgtggttgacctgctcaaggaatcggactcgatgatggtcgaccctaccaatgacatccggattattggctcgatcacggtcgttattctccttggtatctcagtggccggaatggaatgggaagccaaagcccaggtcatccttctcgtcatcttgctgatcgcgattgccaactttttcatcggtactgtcattccttccaacaacgagaaaaagagcagaggattctttaactaccaggcttcgatcttcgccgagaacttcggacccagattcacgaagggtgagggatttttcagcgtgttcgcgatcttcttccccgcggcgacgggaatcttggcgggtgcgaacattagcggggacttagaagatccccaagacgcgatcccccgaggaaccatgctcgctatcttcatcaccaccgtcgcttacctcggcgttgccatttgtgtcggggcctgtgttgtgcgtgatgccacaggcaatatgaacgacacgatcattagcggcatgaactgcaacgggtccgctgcttgcggactgggttacgatttctcccgttgccggcacgagccgtgccagtacggtctaatgaacaatttccaggtgatgagcatggttagtggcttcggtcctcttatcacagccggaatcttcagcgcgaccctgagctccgctctggcctcactcgtgtccgcccccaaggtgttccaggctctgtgtaaggacaacatctataaggcccttcagttctttgctaagggatacggcaagaacaatgagcctctgcgtgggtacatcctcaccttcctcatcgcgatggctttcattctgatcgccgagttgaatacaattgctcccattatttcgaactttttcttggcatcttacgccctaatcaactttagctgttttcatgcctcctacgccaagtcccccggctggcgtcccgcttacggaatctacaacatgtgggtgtctctcttcggcgccgtgctctgttgtgctgtgatgttcgtaatcaactggtgggctgccgtcatcacgtacgtcatcgagttcttcctgtacgtctacgtcacctgcaagaagcccgacgtgaactggggtagctccactcaagccctgagctatgtctccgcgctagacaacgcgttggagttgaccaccgttgaagaccatgtcaaaaacttccgcccacagtgtatcgtgctgaccggcggacctatgacgcgcccagctctgctggacattacgcatgccttcaccaaaaactccggcctgtgcatatgctgcgaagtcttcgtcggaccacgcaagctctgcgttaaggagatgaacagcggaatggctaagaagcaagcatggttgatcaagaacaaaatcaaggctttttacgccgctgtcgctgcggattgcttccgagacggcgtgagaagcctgctccaggcttccggcctgggtcggatgaaaccaaataccctcgtcatcgggtataagaagaactggcgcaaggctccactcacggagatcgaaaactatgttggtatcatccacgacgcgttcgactttgagattggtgtcgtcatcgttcgtatcagtcaaggtttcgatatctctcaggtgctgcaagtccaggaagagctggagcgccttgagcaggagaggctcgcactcgaagcaactattaaggataatgagtgtgaggaagagtcgggcggcatccgcggtttatttaagaaggccggaaagttaaatatcacaaagacgaccccgaagaaggacggctcaatcaacacctctcaatctatgcacgtcggagagttcaaccaaaagctggtcgaagcgtcaacacaattcaagaagaagcaggagaagggtaccattgacgtgtggtggctcttcgatgatggaggtctcacccttctgatcccgtacatactcaccctgcgcaagaagtggaaggattgtaagctacgtatctacgttggcggcaagattaaccgaattgaggaggagaagatcgtgatggcgtctctgctgtccaagttccggatcaagttcgccgacatccacatcatcggcgatatcaacattaggcccaataaggagagctggaaggtcttcgaggaaatgattgagccataccgcttgcacgagtcctgcaaggatttgaccactgcagagaaactcaagcgcgagaccccctggaagattaccgacgcggagctggaggccgtaaaagaaaagtcgtaccgccaggtccgtctgaacgaacttttgcaggagcatagtcgcgcagcgaacctcatcgtgcttagcctgccagttgctaggaagggaagcatctccgacctcctctatatggcttggctggagatcctcacgaagaatctcccgcctgtactgcttgtgaggggtaaccacaaaaacgtactcaccttctatagc

SEQ ID NO: 251116 - DNA, 3297 bp, synthetic construct
  misc_feature 1..3297: note = Description of Artificial Sequence: Synthetic coding sequence
  source 1..3297: mol_type = other DNA
atgagccttaataattcctcgaacgttttccttgatagtgtgccgtctaacacaaatcgtttccaggttagcgttattaacgaaaatcatgagtcatctgcagccgcagatgacaatacagacccgccgcattatgaagaaacttcgtttggtgatgaagctcaaaagagattgagaatttcttttcggcctggtaatcaggaatgttatgataacttcttgcagagtggagaaacggccaaaacagatgcttcttttcatgcttacgactcacatacgaatacctattatttgcagacgtttgggcataacacaatggacgctgtcccgaaaattgagtattaccggaatactgggagcatcagtggaccaaaagttaaccggccttctctgctcgaaattcatgaacagcttgctaaaaacgtcgctgttacaccttcatccgctgaccgggtggctaacggagacggaataccgggcgatgagcaagccgaaaacaaagaagatgaccaggccggcgtggttaaatttggatgggtcaaaggtgtcctagttcgctgcatgctaaatatttggggagtcatgttgtttatccggcttagttggatcgttggcgaagccggcattggcctgggagtcattattatcggtctttcagttgtagttaccacgcttaccggcatttctatgtcagccatttgtacgaatggggtcgttcgtggaggcggtgcgtactatctgatttcacgctcattgggaccggaatttggtggtagtataggccttatctttgcatttgcgaatgctgtcgctgttgcgatgtatgtagtggggtttgcagaaacagtcgttgaccttttgaaagaatctgattctatgatggtggatccaacgaatgatataagaatcataggcagcatcacggtcgtgatcctgcttggtataagcgttgctggtatggaatgggaggccaaggcgcaggtcatcctgcttgtgatactgctcatcgctattgccaacttttttattggaacagtcatcccgtctaacaatgaaaaaaagtctcgtggattttttaattatcaagcttcgatctttgcagaaaactttggtccacgctttacaaaaggtgaaggcttcttcagtgtcttcgcgattttttttccagctgcaacgggcatattagctggcgcgaacatctccggagatcttgaagatccgcaggatgctataccacgcggcacaatgttggcgattttcatcaccacagtggcgtatctcggggtagccatctgcgtaggcgcatgcgttgttagggatgccaccggcaacatgaacgataccattatatcgggcatgaactgtaacggctccgccgcttgcggattagggtatgatttttcgcgatgcaggcatgaaccgtgccaatatggtcttatgaataacttccaagtgatgtcaatggtatcaggtttcggcccactgattacggcaggcatcttttctgccacactttcctcggccttagcatccttagtgtctgcacctaaagtctttcaagctctgtgtaaagataatatttataaagccctgcagtttttcgctaaaggctatggaaagaacaacgaaccactcaggggctatattcttacatttctcattgctatggcatttatccttatcgctgaattaaataccatcgctccgatcatctcaaattttttcctggcttcttacgccttaatcaattttagttgctttcatgcctcctatgcaaaatcaccgggatggcgtccagcatacggaatctataatatgtgggtatcattatttggagcggtattatgttgtgctgtcatgtttgttatcaattggtgggcggcggtcattacatatgtcatcgaattctttttatacgtttacgtgacgtgcaaaaaaccggacgtgaattggggttctagtacacaagctcttagttatgtctctgctcttgataatgcgttagaacttacaaccgtcgaagatcatgttaaaaattttcgcccacagtgtatagtgctgacggggggtccgatgactcgtccagctctgctggacatcacacatgcgttcacgaaaaatagcggactgtgtatctgctgcgaagttttcgtaggtcctcgtaaactttgcgtgaaggagatgaattccggaatggccaaaaagcaggcctggttgatcaaaaataaaattaaagcattttatgcggctgttgctgctgactgttttcgggacggtgtaaggtctctgctgcaagcgtcagggctggggcgcatgaaacccaatacgttggtgatcggatacaaaaaaaattggcgcaaagcgccacttacagaaatcgaaaattacgtcggtattatacacgacgccttcgactttgaaattggtgtagtgatagtacgaataagccaaggattcgacatctcacaagttttacaggtacaggaagaactcgagcgtttagaacaagagaggcttgccttagaagcaaccattaaagataatgaatgcgaggaagaaagtggaggaattagaggcctgtttaaaaaagcgggcaaactaaatatcactaagaccacgccgaagaaggatggcagtataaatacctcccaatcaatgcatgtaggagaatttaaccagaaattggtagaagcttcaacgcaatttaagaaaaaacaggagaaaggaacgatcgacgtctggtggttgttcgatgacggcgggctgactctgctgattccctacattttgacacttagaaaaaagtggaaagactgtaagttacgcatatatgttggtgggaaaatcaaccgtatagaggaagagaaaatcgtcatggcttctttattatcgaagtttcgtatcaagtttgcagatatccacataatcggggatattaatattcggcctaataaggaatcatggaaagtcttcgaagaaatgatcgagccgtaccgattacacgaatcatgtaaggatcttacaactgcagaaaaactgaaaagagagacgccgtggaaaatcacagacgcggaattagaggcagtgaaagaaaaatcctatagacaagttcgtttaaacgaattactgcaggaacatagccgggcggcaaatctgatcgtcttatcactccctgtcgctcgtaaaggctccataagcgatttactttatatggcttggctggaaatcttaacaaaaaacttaccacctgtactcctcgtaagaggcaatcacaaaaatgtattaacgttctattct

SEQ ID NO: 251117 - DNA, 3297 bp, synthetic construct
  misc_feature 1..3297: note = Description of Artificial Sequence: Synthetic coding sequence
  source 1..3297: mol_type = other DNA
atgtcgttgaacaactcatccaatgtctttctggactccgtgccgtcgaacacgaatcggtttcaagtgtcggtaatcaacgaaaaccatgagtcctcagccgcagcagatgataatactgacccgcctcactacgaggaaacttcattcggagatgaagcccaaaagcggttgaggatttcattcaggcccggaaaccaggagtgctacgacaattttctgcaatccggagagacggccaagaccgatgcctcgttccatgcttacgattcccatactaacacgtactatctgcaaacctttgggcacaacaccatggatgcggtcccaaagatcgaatactatcgcaacactggcagcatttcgggaccgaaggtcaatcgcccatccctgcttgagatccacgaacagctggcgaagaacgtggccgtgacgccgtcatcagccgaccgagtggccaatggagacgggatcccaggcgacgaacaggcggagaataaagaagatgatcaagccggcgttgtcaagttcggctgggtcaagggagtgttggtgcggtgcatgctgaacatatggggcgtgatgctcttcatccgcctgtcctggatcgtgggagaggcagggatcggactcggcgtgatcatcatcggactgtccgtcgtggtcaccactctgactggaatttcgatgagcgcgatctgcaccaatggggtggtgaggggaggaggagcatactacttgatctcccgttctcttggcccagaatttggaggatccattggactgatcttcgcatttgcgaacgctgtcgcggtggcaatgtatgtggtgggcttcgcagagactgtggtggatctgcttaaggaatcagacagcatgatggtggatcccaccaacgatattcggatcatcggcagcatcactgtcgtcatcctgctgggcatttccgttgctggcatggaatgggaggccaaggcccaggtgatcctcctggtgatccttctgattgcgatcgccaacttcttcatcggaactgtgatcccatcgaacaatgagaagaaatcgcgcggatttttcaactaccaagcctcgatctttgccgagaacttcggcccgagattcactaagggtgagggattcttttctgtgttcgcgattttctttcctgctgcaactggaatcctggcgggagccaacatctcgggtgatctggaagatccgcaggacgctatccctcgcggtactatgctcgcgatcttcatcaccacggttgcttacctgggagtggcgatctgcgtgggtgcttgcgtcgtgcgcgacgccactggaaatatgaacgatactattatcagcggaatgaactgcaacggatcagccgcctgcggcctcggttacgatttctcacgctgtagacacgaaccgtgtcagtacggcctgatgaacaatttccaagtcatgagcatggtcagtggatttggaccgctcatcactgccggaatcttttcagccactctctcgtcggccttggcgagcctcgtgtccgctcctaaagtgtttcaagcgctctgcaaagacaatatctataaggcgttgcagttcttcgcgaagggctatggaaaaaacaatgagccgcttcggggctacatcctgacttttttgattgctatggcattcatcttgatcgcagagcttaataccattgccccgatcatctccaacttttttctggcctcctacgcgctgatcaatttctcgtgcttccacgcttcctacgctaagtcaccgggatggcgccctgcctacggcatctacaatatgtgggtgtccttgtttggcgctgtgttgtgttgcgccgtgatgtttgtcatcaactggtgggcagcagtgatcacctacgtgatcgaattcttcctttacgtctacgtcacttgtaagaaaccagacgtcaactgggggtcgtccactcaggccctgtcctacgtgagcgccctcgacaacgccctggaactgaccaccgtcgaagatcatgtgaagaacttccggccgcagtgcatcgtgctcactggaggacccatgacgcgccctgcgctgctcgacatcactcacgccttcactaaaaactccggtttgtgcatctgctgcgaggtgttcgtcggcccgcggaagctgtgcgtgaaggagatgaactcaggcatggctaagaaacaggcctggctgatcaaaaacaagattaaggctttttacgcagccgtcgccgccgactgttttcgcgacggtgttcgctcactgctgcaggcgtccggactcggacgcatgaagccgaacacgctcgtgatcggctacaagaagaactggagaaaggccccgctgaccgaaatcgaaaactacgtgggtatcatccatgatgccttcgacttcgaaattggagtcgtcatcgtccggatctcgcaaggttttgatatctcccaggtgcttcaagtccaggaggagctggaacgcctggagcaggagaggctggccctggaagcaaccatcaaggataatgagtgtgaagaggaatcgggtggtatccgcggcctctttaagaaggccgggaagctcaacatcactaaaaccactccaaagaaggacggtagtatcaacacctcgcaaagcatgcacgtcggtgaattcaaccagaaactggtggaggcttcgacgcagtttaagaaaaagcaagagaagggcactatcgatgtgtggtggctgtttgatgatggtgggctgaccctgctcattccatacattctgactctgcggaagaagtggaaagactgcaagctgaggatctacgtcggagggaaaatcaaccgcatcgaagaggagaaaattgttatggcctcgctgctgtcgaaatttcgcatcaagttcgctgacatccatatcatcggagacatcaatatccggccgaataaagagtcctggaaggtgttcgaggagatgatcgaaccgtacagactgcacgagtcctgcaaagacctcactactgcagaaaagctgaaaagagaaactccgtggaagatcaccgacgcagaactggaggccgttaaggagaagagctaccggcaagtgcgcctgaacgaacttctgcaggagcacagcagggccgcaaacctcatcgtgttgtcgctgcccgtcgcacggaaaggttctatcagcgacctgctctacatggcgtggctcgagatcttgacgaaaaatctgccacccgtccttctggtccggggaaaccataagaacgtgctcactttttactcg

SEQ ID NO: 251118 - DNA, 3297 bp, synthetic construct
  misc_feature 1..3297: note = Description of Artificial Sequence: Synthetic coding sequence
  source 1..3297: mol_type = other DNA
atgtccctcaataactcgtcaaacgtgtttctggacagcgtcccgtcgaacactaatcgttttcaagtctcggtgatcaatgaaaaccatgaaagctccgccgcggcagatgacaacaccgatcctccgcattacgaagaaacctcattcggagatgaagcccagaagcgcctgaggattagttttcggcccggaaatcaagagtgttacgataactttcttcaatcgggtgaaaccgccaaaacggatgccagcttccatgcatacgattcccataccaacacctactacctgcagactttcggacacaatactatggacgcagtgcccaaaatcgaatactaccgaaacacgggttccatttccggtcctaaggtgaaccgaccttcacttctcgaaattcatgaacaacttgccaagaacgtggcggtgaccccatcatctgcagacagagtggcaaatggggatgggattcccggtgatgaacaagcagagaacaaagaagatgaccaggcaggggtggtcaagtttggatgggtgaagggtgtgctcgtccggtgcatgcttaacatttggggtgtgatgctcttcattagactgtcctggattgttggtgaggcaggaattggtttgggggtcatcattattggactcagcgtggtagtcactactttgactggaatatctatgtccgcaatttgcactaatggagttgtgcgaggcggtggggcatattaccttataagccgctcgcttggtcctgagtttggtggttcaattggtctgattttcgcattcgcaaatgcggtggcagtggcaatgtacgtggttggattcgcagaaaccgtcgtggatctgctgaaggaaagcgactctatgatggtggacccgactaacgatataagaattatcggatcgataaccgttgtgatcctcctgggcatttcagtggcggggatggaatgggaagcgaaagcacaagttatcttgctggtgatcctccttattgcaatagcaaatttctttattggaactgtgattccatccaacaacgagaagaagtcaagagggttcttcaattaccaggcatcgatttttgcagagaattttggacctaggtttactaaaggcgaaggctttttctcagtgttcgccatctttttcccagcagcaaccggaatactggcaggagccaacatttcgggtgacctcgaagatccacaggatgcaattccacgcgggaccatgctcgcgatctttatcaccaccgtcgcttaccttggagtcgctatctgtgtcggcgcatgcgtcgtgagggatgctaccggtaacatgaatgatactatcatttcaggtatgaactgtaacggatcggccgcatgtgggttggggtatgatttttcacggtgtcggcatgaaccctgtcaatacgggctgatgaacaattttcaagttatgtccatggtatccggatttggacctctgattactgctggaattttctccgcgactctctcatctgcactggcctcactggtgtcagcaccgaaggtgtttcaagccctctgtaaagacaacatctataaggcactgcagttttttgcaaagggttacgggaaaaacaatgagccgcttaggggttacatccttacttttctcattgcgatggcctttatactgattgcagaacttaacactatcgctccaatcattagcaatttcttcctggcatcctacgcccttatcaatttctcgtgctttcatgcatcctacgcaaaatcccccgggtggcgccccgcgtacggaatctacaacatgtgggtgtccttgtttggtgcagtgctgtgttgtgcagtcatgtttgtgatcaactggtgggccgcagtgatcacctacgtgatcgagttttttctgtacgtgtatgtgacttgcaagaagcccgatgtcaattggggaagctccactcaggccttgagctacgtgtccgcactggataatgcgctcgaactgaccaccgtggaggatcatgtcaaaaactttcggccccagtgcattgtcttgaccggtggaccaatgaccagacccgcattgctggatataacccatgcgtttaccaagaactcgggactctgtatctgttgcgaagtgttcgtcggcccacggaaactttgtgtgaaagagatgaactccggcatggctaagaagcaagcgtggctgattaagaacaaaatcaaagcattctacgcggcagtggccgccgattgttttcgagacggcgtccgctcactgctccaggcatccggactgggacgtatgaaacctaacacccttgtgataggttacaaaaagaattggcggaaggcaccccttaccgagatagagaattacgtgggtatcattcacgatgcatttgattttgaaataggggtggtcatagtgcgaatatcccaaggttttgacattagccaggtccttcaagtgcaggaggaacttgagcgcctcgagcaagaacgactcgcccttgaggcaacgattaaagacaacgaatgcgaggaagagtcaggaggaatccgcggtcttttcaagaaagccgggaaattgaatatcactaagactaccccaaagaaggatggttcgattaacacctcccagtctatgcatgtcggtgaattcaatcagaagctggtggaagcatcaacccagttcaaaaagaaacaagaaaagggaacgattgatgtgtggtggcttttcgatgatggagggcttactcttctgattccatacattcttactcttcggaagaagtggaaagactgtaaacttcggatctacgtgggtggaaagatcaatagaatagaagaagagaaaattgtcatggcatctcttctttcaaagttccggattaagtttgctgacatccacattatcggcgacattaacattcggcctaacaaagaatcctggaaagtctttgaagaaatgattgagccatacagactgcacgagtcgtgtaaagatcttaccaccgcagagaaattgaagcgagaaacgccttggaaaatcacggatgccgaactggaagccgtgaaggagaagtcttataggcaggtgagactgaacgaactgcttcaggaacacagccgggcagcaaacctgattgtcctctcgctccctgtggcaagaaagggatccatttcggatctcctttacatggcatggctggagatccttacgaagaacctcccaccagtgcttctggtgagaggtaaccacaagaacgtgctgacgttctattcg

SEQ ID NO: 251119 - DNA, 3297 bp, synthetic construct
  misc_feature 1..3297: note = Description of Artificial Sequence: Synthetic coding sequence
  source 1..3297: mol_type = other DNA
atgtctctgaacaactctagcaatgtgttcctggattcggtaccaagtaacaccaaccggtttcaagtgtccgtcataaatgagaaccatgagagctctgccgcagctgatgacaacacagatccaccccattatgaagaaacttcattcggggatgaagcacagaagcggcttcgcatctcttttagaccagggaaccaggagtgctatgacaacttcctgcagtcgggtgagaccgcaaagactgacgcctccttccacgcttacgatagccacactaatacctattacttgcagaccttcggccacaacacaatggatgcagtgccaaagatcgagtactacagaaatactggctcaatttccgggcccaaagtcaaccgaccatctctgttggagattcatgagcagctcgcaaagaatgtcgccgtcacaccctccagtgcagaccgagtggcaaacggcgatggaattcccggtgatgaacaggccgagaacaaagaggacgatcaggcaggagtcgttaaatttggatgggtgaaaggagtgctggtgagatgtatgcttaatatttggggcgttatgctatttattcgtctgtcctggattgtgggggaagccgggattggactgggtgtgataatcattgggctttcggtggttgtgacgacacttacggggattagtatgtcggcaatatgcacaaacggcgtggtccgcggcggaggagcgtattacctgattagtaggagtctaggccctgaattcggcggtagcataggactgatctttgcctttgcaaatgccgtggctgtcgcgatgtacgtcgtgggattcgcagaaacagtggtagacctactaaaagaatccgattcaatgatggtcgatcccacaaacgatatccgtattatcggctcaatcactgtggtcatactcctgggcatttcagtcgccggtatggagtgggaagcgaaagcacaagtcattctgttggtgatccttttgatcgctatagcaaatttcttcatcggcactgtgatcccatccaacaacgagaagaagagccgaggcttcttcaactatcaggcgtccatcttcgccgaaaacttcggccctcgatttaccaaaggcgaagggtttttctccgtctttgctatctttttccctgccgcaactggaatcctggcaggtgctaacatctccggggatctggaggatccccaggacgctattcccagagggactatgctggctatctttatcaccaccgtcgcatatctgggcgtggccatctgcgttggtgcctgtgtcgtaagggatgcaacaggcaacatgaacgatacgatcattagcggcatgaactgtaacggcagcgctgcatgtgggttgggatatgacttttccaggtgtaggcatgagccttgtcagtacggcctcatgaacaatttccaagtcatgagcatggtgtccggattcggccctttgattacggcggggattttcagcgcgacgctgagctccgcactcgcatcgttggtgagcgcccccaaggtatttcaggccctatgcaaagacaacatctacaaggccttgcaattcttcgccaaggggtacggaaaaaacaacgagcctctacgcggctacattcttacttttctaattgccatggcttttatcctgatcgctgagctgaatacaattgctcctatcatcagcaacttcttcctggcttcatacgcactcattaattttagttgtttccacgctagctatgctaaatctcccggatggcgccctgcatacggcatctacaacatgtgggtgtcacttttcggggcagtcctatgttgtgccgtgatgttcgtgattaactggtgggcagcggttatcacatacgtgatcgagtttttcctgtatgtttacgtcacctgcaagaagcccgacgtgaactggggaagctctacccaggctctgtcatatgtgtccgccttggacaatgcactagagctcaccaccgtggaggatcatgtgaaaaatttccggcctcagtgtatagtgcttacgggaggacccatgactaggccagcccttttggatataacacacgcctttaccaagaattctggcctttgcatttgttgcgaggtgttcgtcgggccacgcaaactgtgcgtcaaggagatgaattctgggatggcgaaaaaacaggcctggttgatcaagaataagattaaggccttttatgccgctgtcgctgccgactgttttcgcgacggcgtacgatctcttctgcaagcgagcggcctgggcaggatgaagccaaatacccttgttataggttataaaaaaaactggagaaaggcaccgctaactgagatagaaaattatgttggaattattcatgatgcattcgacttcgaaattggcgtggttatcgtgcgtatttcacagggcttcgatatttcgcaggtactgcaggtgcaggaggagctggaaaggctggagcaagagagattggccctggaagcgacgatcaaggataatgagtgcgaggaagagtctgggggcatcagggggctctttaagaaggctggaaaattgaacattacaaagacgactccaaaaaaagatggctcaattaacacctctcagagtatgcacgtcggtgagtttaatcaaaagctggtcgaggcctccactcagttcaagaaaaaacaggaaaaggggactatcgatgtttggtggctgttcgatgatggtgggctcaccttactgatcccctacatactgactctccgcaagaaatggaaagattgtaagttgaggatatatgtcgggggaaagataaaccggattgaggaagaaaaaatcgtgatggctagtttgctgtctaagttcaggataaagttcgctgatatccatatcatcggagacatcaatatacgacccaacaaagaaagctggaaagttttcgaggagatgatcgagccgtatagactccacgagtcctgtaaagatttgactactgcggaaaagctgaagcgtgagactccctggaaaattaccgacgctgaattagaagctgtaaaggaaaagtcctaccgacaagtccgtctgaacgagctgctgcaagagcactctagagcggcaaatcttattgtgctgagtttgcccgtggccagaaaggggtctatatcagatctgctgtatatggcttggctggaaatcttaacgaaaaatctgcctcccgttctattggtgagaggtaaccacaaaaacgtactcacattctactca

SEQ ID NO: 251120 - DNA, 3297 bp, synthetic construct
  misc_feature 1..3297: note = Description of Artificial Sequence: Synthetic coding sequence
  source 1..3297: mol_type = other DNA
atgtcattgaacaattcgagcaacgtgtttcttgacagcgttccatctaataccaatcggttccaagtatctgtaatcaacgagaatcatgagagttctgccgccgctgatgacaatactgatccacctcactatgaagaaacttccttcggggatgaagcccaaaagaggcttagaatcagtttccggccgggcaaccaggagtgctacgataattttctgcagtccggagaaaccgcgaaaactgacgccagttttcatgcctacgattcacatacaaacacctattacctccaaaccttcggacacaacactatggatgccgtgcccaaaattgagtactatcggaacactggaagtatatccggccctaaagtgaatagacccagcctgttggagatacatgagcagctggcaaaaaatgtagcagtgacacctagctcggccgaccgggtcgccaatggggacggaatacccggagatgaacaggctgagaataaggaggacgaccaggctggagtggttaaatttggctgggtgaagggggtcctggtgagatgtatgttgaatatctggggcgtcatgttgttcatccgcctgtcttggatagtgggtgaggccggcattggactaggtgtcatcataatcgggttgtccgtcgtcgtgacaaccctgacggggattagcatgagcgccatttgcacaaacggagttgttcggggcggcggcgcttactacctgatctcaagatctctgggacccgagttcggagggtccataggtctgatcttcgcatttgccaacgcggtcgcagtggccatgtatgtcgttggctttgccgagacagtagtggacctgctgaaggagagtgactcaatgatggttgaccctacaaacgatatccgcatcatcggaagcatcacagtcgtgatcttgctcggcatctcagtagctggcatggaatgggaggccaaagcccaggtgatactcttagtgatcttattgattgctatcgcaaattttttcatcggaaccgtaatcccttccaacaacgaaaagaagtcacgcggtttcttcaattaccaggcttcaatatttgccgaaaactttggcccccggttcaccaagggggagggatttttctctgtgttcgccatcttcttccccgcggccactgggattctggctggagcaaatatcagcggagacctagaggaccctcaggatgccattcctcggggaacgatgctggcaatattcatcacaacggtggcatacctcggggtggctatctgtgtaggagcatgtgtggtacgggacgcaacaggaaacatgaacgatactatcatcagcgggatgaattgtaacggtagtgcggcatgtggactgggatacgacttctcgcgatgcaggcacgagccatgtcaatatggattaatgaacaatttccaggtcatgagcatggtcagcgggttcgggccattgatcaccgctggcatctttagcgcaacactgagttccgccttagcttccctagtgagtgctcccaaggtattccaagccttgtgcaaggacaacatatataaggctcttcagttcttcgctaagggatacggaaagaataatgaaccactgaggggctatatactgacttttcttatcgcaatggccttcatcctcattgccgagttgaataccattgcgcctatcatatcgaacttctttttggcttcttatgctctgattaattttagttgtttccacgcctcctatgcaaagtcccctggctggcggcctgcatacgggatttataacatgtgggtgtccctctttggcgccgtcctttgttgtgctgtgatgttcgtcattaattggtgggcagcggtcatcacctatgtgatcgagttttttctgtacgtttacgtcacatgtaagaagcccgatgtcaattggggttcatctactcaagcactcagctatgtgtcagccctggacaatgcactggaattgacgacagtggaagaccacgtgaagaacttccgcccacagtgtattgtcctgacgggcggaccaatgacgcggcctgctctcctggacatcacacacgcctttaccaagaatagcgggctgtgtatttgctgtgaggttttcgtagggcctcgcaagttatgcgttaaggaaatgaactctgggatggcaaaaaaacaggcatggttgattaagaacaaaataaaggccttctatgcagccgtcgcagctgactgcttccgagatggggttcgttcgctgctccaggctagcgggctcggcagaatgaagcccaatactttggtcattggatacaaaaagaattggcgcaaggctcccctgactgagatcgaaaactacgtgggaatcatccatgacgcatttgacttcgagataggggtcgtcatagttagaataagtcagggcttcgacatcagtcaggtcctccaggtgcaggaagaactcgagaggctggagcaagagaggcttgccctggaagctactatcaaagataatgaatgcgaagaagagagcggggggatccgtggactgtttaagaaggcgggaaaactcaacataacaaaaacaactcccaaaaaagacggttcaattaacacttcgcaaagtatgcacgttggggagtttaatcagaaactggtggaggcctccactcagttcaagaagaaacaggagaagggcaccattgacgtctggtggttgtttgatgatgggggtttaacattgttaattccctatatcctcacactgagaaaaaagtggaaggattgtaaacttcggatttacgttggcggcaagattaaccggattgaggaggaaaagatagtaatggcctcattgctttccaaatttaggatcaagtttgccgatattcacataattggcgatataaacataagaccgaataaggaaagttggaaagttttcgaggaaatgatcgaaccgtacagattgcacgaaagctgcaaggatttaacaacggctgagaagctgaagagagagactccctggaagattaccgacgctgagttggaggccgtcaaagaaaagagttacagacaggtccggctcaatgagctgttacaagagcacagtcgcgccgctaatctcattgtacttagcttacccgtcgctcggaaaggctccatttccgacctgctctacatggcctggcttgagatacttacgaaaaacctgccacctgttcttctggtgcggggtaatcacaagaacgtgctaaccttttactct

SEQ ID NO: 251121 - DNA, 3297 bp, synthetic construct
  misc_feature 1..3297: note = Description of Artificial Sequence: Synthetic coding sequence
  source 1..3297: mol_type = other DNA
atgtcgctcaacaattcctccaacgtctttttggattccgtcccgtcaaataccaaccgcttccaggtgtcggtgatcaacgaaaaccatgaatcctcggcagctgcggatgacaacactgacccaccccattatgaggagacttcgtttggcgatgaagctcagaagcgcctccggatcagcttcaggccgggaaaccaggaatgttacgacaactttttgcagtcgggagagactgcgaaaactgacgcatcgttccatgcctacgactcgcacactaacacctactatttgcagaccttcggacacaacacgatggacgccgttccgaagatcgagtactaccggaataccggctcaatatcaggtcctaaagttaatcggccaagcctccttgagatccatgagcagctcgcaaaaaatgtggccgtgactccgagctctgcagacagagtcgccaatggagacggcatcccgggagatgaacaggccgagaataaggaggacgatcaggcaggagtggtgaagttcggatgggtcaagggggtgctggtgcgttgtatgctgaatatctggggagtgatgctcttcatcaggctgtcatggatcgtgggagaagccgggattggactgggcgtgattatcattgggctcagcgtggtcgtgactaccctgactggaatctcgatgtcggccatctgtaccaacggagtcgttcgcggaggaggagcctactacctgatctcacgctcgctggggccggaattcggcgggtctatcggactcatatttgcgttcgcgaatgcggtcgccgtggcgatgtacgtggtcggatttgcagaaaccgtggtggatctgctgaaggaaagcgatagcatgatggtcgaccccaccaacgatattagaatcattggatcaatcaccgtggtgatcctgcttgggatcagtgtggcgggtatggagtgggaagcgaaggcccaggtgattttgctggtgattctgcttatcgcgatcgccaattttttcatcggtactgtgatcccatcaaacaacgaaaagaagtcaagaggattctttaattaccaagcgtccatctttgccgaaaatttcggtcctcgcttcaccaagggagaaggtttcttctccgtgttcgcaatcttcttcccggcggccacgggaatcctggctggagcaaacatctcaggtgatctggaggacccgcaagacgctatcccgcggggtaccatgctcgcgatcttcatcaccactgtcgcctacctgggcgtggcgatttgcgtcggagcctgcgtcgtgcgggacgccaccggtaacatgaatgacaccatcatctcaggcatgaattgcaacggaagcgccgcctgcggcctcggatacgatttctcgcgctgtcgccacgagccctgccaatacgggctgatgaacaactttcaagtcatgtcgatggtgtccggctttgggccactgatcacggccggcattttctctgctaccttgtcaagcgccctcgcttccctggtgtccgccccaaaggtattccaagcactttgtaaggacaatatctacaaggctctgcaattcttcgctaagggatatggaaagaacaacgagccacttcgcggatacatcctcacttttctgatcgcaatggccttcatcctgatcgcggaactgaataccatcgcgccgatcatctccaactttttcctcgccagctacgccctgatcaatttctcatgtttccacgcaagctacgctaagtcccctggatggcgccccgcgtacggcatctacaacatgtgggtgtccctgttcggagctgtgctgtgctgcgccgtgatgttcgtcatcaattggtgggccgccgtcattacctacgtgatcgagttttttctctacgtctacgtgacctgtaagaaacctgatgtcaactggggcagcagcacccaggcgcttagctacgtgtcggcactggataacgctctggaacttacgaccgtggaggaccacgtcaaaaatttccgcccgcagtgcatcgtccttactgggggcccgatgacccggccggctctgctcgatatcacccacgctttcaccaaaaactcggggctgtgcatctgctgcgaagtgttcgtcggaccacggaaactctgcgtcaaagaaatgaactccggtatggcaaaaaagcaggcatggctgatcaagaacaagatcaaggcgttctacgccgcagtcgccgcggattgcttccgcgatggagtgcggagcctgttgcaagcctccgggctcggtaggatgaaaccaaacactctcgtgatcggatacaagaaaaattggaggaaggcgccgcttacggaaattgagaattatgtgggcatcattcacgatgcatttgacttcgagattggggtggttattgtgcgcatctcgcagggctttgacatctcgcaagtgttgcaagtccaagaggaattggagagacttgaacaagaaagactggctctggaagctactatcaaggacaacgaatgcgaagaggaatcaggaggtatcagggggctgttcaagaaggccggcaagctcaacatcactaagactaccccgaagaaggatggatcgataaacacgagccagtccatgcacgtgggagagttcaaccagaaactcgtggaagcgtcgacccagtttaagaagaagcaggagaagggaaccatcgacgtctggtggctgttcgacgacggcggactcactctcctcatcccgtacattctcaccttgagaaaaaagtggaaggactgcaaattgcgaatttacgtaggaggcaaaattaatcgaatcgaagaagagaagatcgtcatggccagcctgctctccaagttccggatcaaattcgccgacatccacatcatcggcgacatcaacatccggcctaacaaagagtcgtggaaggtgttcgaagaaatgatcgagccatacagactgcatgagagctgcaaggaccttactacggctgagaagctgaagcgggaaactccctggaaaattactgatgcggagctcgaggccgtgaaagaaaagtcataccgccaggtgagactgaacgaactgctccaggaacactcccgggccgcaaacctgatcgtgctgtccctgcctgtggcccgcaaaggatcgatttccgacctgctgtacatggcatggctcgagatcctgactaagaatctgccacctgttctgctggtgagaggcaaccataagaacgtgctgactttctactcc

SEQ ID NO: 251122 - DNA, 3297 bp, synthetic construct
  misc_feature 1..3297: note = Description of Artificial Sequence: Synthetic coding sequence
  source 1..3297: mol_type = other DNA
atgtccctgaacaattcatctaatgttttcctcgactcagttccttctaatacaaataggttccaggtgtctgtcataaacgagaatcatgaaagctccgcagccgcagatgataatacggacccaccccattacgaagaaacctcctttggagacgaagctcagaagcgattgcgtatatcctttagacccggtaaccaggaatgttacgataatttccttcagagcggggagacagcgaaaaccgacgccagcttccatgcatacgattcacataccaatacttactacttacaaacctttggtcacaataccatggatgctgttcccaagattgaatactaccgaaatactggctcaattagcggtcccaaagtaaataggcccagtcttctggaaattcatgagcagctcgccaagaatgtcgccgtcactcccagctccgcagacagggtggctaacggcgacggcattcctggggacgaacaggccgaaaacaaagaggacgaccaggctggagtagtcaagttcgggtgggtaaaaggagtcctagtacgctgcatgctgaatatctggggagtgatgctgtttatcaggttgagctggatcgtgggggaggcaggaatagggctgggcgtaatcattattggtttgtcagtggttgtaactaccctaactggtatctcaatgagcgctatctgcaccaacggagtggtcagaggcggcggcgcctactaccttatctcccggagtctagggccggaattcggcggctctattgggttgatctttgcatttgccaacgcagtggccgtggctatgtacgtagtggggtttgctgagacagttgttgacttactaaaagagagcgattccatgatggtagaccccacgaatgacatccgcatcattggctccatcaccgttgtgatactactgggcatatcagtggctggcatggagtgggaggccaaggctcaggtgattctcctggtcatcctgctgatcgcaatagcgaatttctttatcggaactgtaatcccaagcaacaacgaaaaaaagtcccgcgggttcttcaactatcaggccagcatctttgctgagaatttcggaccccggtttaccaagggggaaggttttttctccgtgtttgctatcttcttcccagcagctaccggtattctggccggcgcaaatatttccggggacctggaggacccccaagatgctatcccccgaggaacgatgttggcaattttcattacaacagtggcctatttgggcgtggcgatttgcgtaggcgcatgcgtcgttcgggacgcaaccgggaacatgaacgacaccattatctcagggatgaactgtaatggatccgcggcctgcggcttggggtatgacttctctagatgtaggcacgagccttgtcagtacggtctgatgaataacttccaggttatgagtatggtgagcggtttcggacctttaatcacagcaggaatattctctgcgaccctgtcgtcagcgctggctagcctggtcagtgcaccaaaggtgttccaagccctatgcaaagataatatttataaggcactgcagtttttcgctaaaggctatggaaagaataatgagcctctacgaggctatattctgacttttctgatagccatggcatttattctcatcgcggagctgaacacaatcgctccaatcatctccaattttttcctggctagctatgccttgattaatttcagttgttttcacgcgtcatacgctaaatcaccggggtggcggcctgcttatggtatttacaacatgtgggtttccctctttggagcggtgctgtgctgcgcggttatgtttgtcatcaactggtgggctgctgtcatcacatacgtgatcgaattctttctatatgtgtacgtgacatgtaagaaacctgatgttaattgggggtccagtacacaagcattgagttatgtcagcgccttagacaatgctctagagctgactaccgtcgaggaccacgtgaaaaacttccgtccgcaatgcatagtattgactggaggccccatgactcgccccgccttgttagacattacacacgcgttcactaagaattcagggctgtgcatctgctgcgaagtattcgttggcccaaggaagttgtgtgtcaaggagatgaattcggggatggctaagaagcaggcatggctaattaagaataagatcaaggcattctatgcggccgtggcagcagactgctttagggatggagttaggtcgttacttcaagcttctggattggggcggatgaaacccaatacactggtgattgggtacaaaaagaactggcgtaaggcgcccctgactgaaattgaaaactacgtcggcattatccatgacgcttttgattttgagatcggggtggtgattgtcaggattagtcaagggttcgatatctctcaagttctccaggttcaggaggaactcgagcgtctggagcaagaacggctggctctagaggctacgataaaggacaatgaatgtgaggaggaaagtggtgggatccgtggtctcttcaagaaagccggcaaactgaatatcacaaaaacaacccccaagaaggatgggtcaataaatacgagccaaagcatgcacgtgggagagtttaatcagaagctagtcgaggcgagtacacagttcaagaagaaacaggagaaaggaaccattgatgtatggtggctgtttgacgacggaggcttgactttgctgattccatatattcttaccctgaggaaaaagtggaaggattgtaaacttaggatttacgttgggggaaagatcaatcggatcgaggaagagaagatcgtgatggcctccctgctttcaaaattcaggatcaaattcgccgacatccacataatcggcgacatcaacattaggccaaataaggaatcttggaaggtttttgaagaaatgattgaaccatacagacttcacgagtcctgcaaggacttgacgactgcggaaaagcttaaaagggagacaccatggaaaattacagatgctgagctggaggccgtgaaagaaaagagctacagacaagtgaggttgaatgaattactgcaggagcactcacgcgctgccaacttgatcgtcctgtctctccctgttgcacgcaagggctcgatttcagatcttctgtatatggcttggctagaaattttgactaaaaatttacctcccgtgctgttagtcaggggcaaccataaaaacgtcctgacgttttattct

SEQ ID NO: 251123 - DNA, 3297 bp, synthetic construct
  misc_feature 1..3297: note = Description of Artificial Sequence: Synthetic coding sequence
  source 1..3297: mol_type = other DNA
atgtccctgaataattccagcaacgtctttctggactccgtgccttctaatacaaatcggtttcaagtcagcgtgataaatgaaaaccatgaatcctctgctgccgcagatgacaatactgacccccctcactatgaggagaccagttttggagacgaagcccaaaagagactacggatatccttccgccccgggaaccaagagtgttatgataattttctacagtccggcgagacagcaaagactgacgcctcctttcacgcttatgacagccacacgaatacatattatcttcagacctttggacacaacacaatggatgccgtgcctaagatcgagtattacagaaacaccggcagtatctccggcccaaaggtgaacagaccaagcctcctcgagatccacgagcagctagccaaaaatgtcgccgtgaccccctcaagcgcagatagggtggcaaatggagacggcatcccgggagatgaacaagccgaaaataaggaagacgaccaggcgggagttgtgaagttcgggtgggtgaagggagtcctggtgagatgcatgttgaatatctggggagttatgctgttcatccgactgtcttggatcgtgggagaggctgggatcggtctcggggtgattataatcggactctctgtagttgttactacactcacaggcatctcaatgagtgccatttgcacaaatggtgtggtccgcggaggtggcgcctactatctgatcagcagatcactaggaccagaatttggcggatccattggcctgatctttgctttcgccaatgcagtggctgttgccatgtacgtggtgggatttgcagaaacagtggtggatcttctgaaagaaagtgacagcatgatggttgatccgactaatgatattaggattataggctctataaccgtggtaatcctgctgggaatatcagttgccggaatggaatgggaggccaaagcccaggtgatattactagtgatactcctgatagcgattgccaacttcttcataggaaccgtcatcccatcgaataatgagaaaaagtcccgcggcttcttcaactaccaggctagtatattcgctgaaaatttcggaccacgcttcactaagggcgagggattcttcagcgtttttgctattttctttcccgcagccacggggatcctggctggtgccaatatcagcggcgacttggaagacccacaggatgcaatcccccgagggaccatgctggcaatttttataaccactgtggcctacttaggggtggccatctgcgtcggagcttgcgtcgtgcgcgacgctacaggtaatatgaacgacacaattatctctgggatgaactgcaatggtagcgctgcatgtgggttaggctacgacttttcacgttgtcggcatgagccatgtcagtatggcttgatgaataactttcaagtcatgtccatggtgtccgggttcggccctctcatcaccgcaggtatcttttctgccacgctgtctagcgctctagcctctctggtatctgctcctaaagtgtttcaggctttgtgtaaggataatatctataaggcgctccagttctttgccaagggttatggcaaaaacaacgagcccctacgtggctatatattgaccttcctgatcgccatggcctttatcctcatcgccgagctgaataccatcgcccctattatttccaacttcttcctcgcaagttatgccctgatcaacttcagctgtttccacgcgtcctacgcgaaaagccccggatggcgcccggcctacgggatctacaatatgtgggtctctttgtttggggcagtgctgtgctgcgccgtcatgtttgtaatcaactggtgggccgccgtgatcacgtacgtgatagagttctttctgtatgtctacgtcacttgcaaaaagccggatgtgaactggggtagctcaacacaagcactcagctacgtgagtgctctcgacaatgctctggagcttacaactgtcgaggaccatgtgaagaattttcggcctcagtgcatcgttctgacaggcgggcctatgacaaggcctgcattattggatattacacacgcattcaccaaaaactctggcctgtgcatttgttgtgaggtattcgtgggacctaggaagctgtgtgttaaagagatgaatagtggcatggctaagaaacaagcctggttgattaagaacaaaattaaggcgttttacgccgccgtggcagctgactgctttcgcgatggcgtccggtccctcctgcaggcctcaggactcgggcgaatgaaacctaatactcttgtgataggctacaaaaagaactggcggaaagctcctctgactgagattgaaaactacgtcggcatcatacacgatgcttttgactttgagattggggtcgttattgtccgtatctcgcaggggttcgatatcagccaggtcctacaggtccaggaagagctggaacggttagagcaggaaaggctggctctcgaggcaacaattaaggataacgaatgtgaggaagaatctggtggcatacgtggactctttaagaaagccggaaagttgaatatcaccaaaactacccctaagaaggatggcagcattaacacttcgcagagcatgcatgtgggggagttcaatcagaaattagtcgaggcctccacccaatttaagaagaaacaggagaaagggacaattgacgtatggtggctgtttgatgatggggggctgacactgctgataccttacatattgacactgcgcaagaaatggaaggactgtaaactgagaatatatgtgggtgggaagatcaataggattgaggaggagaaaatcgtaatggcctctctcctgtcaaagttcagaataaaattcgccgatatacatatcattggggacatcaatattaggccaaacaaggaatcatggaaggtttttgaggaaatgatagagccctacaggctgcacgagtcttgcaaggaccttaccacagcagaaaagttgaaacgggagacaccgtggaagatcacggatgctgagctcgaagcagtgaaggaaaagtcataccgccaggtcagactgaacgaactgctgcaggaacactccagggcagccaatttgatagttctttccctgcctgtcgccagaaaagggagcatttctgatctgttatacatggcttggctggagatcctcaccaaaaacctccctcccgtgctgctggtgcgagggaatcacaagaatgttcttacattctattct

SEQ ID NO: 251124 - DNA, 3297 bp, synthetic construct
  misc_feature 1..3297: note = Description of Artificial Sequence: Synthetic coding sequence
  source 1..3297: mol_type = other DNA
atgtctcttaacaattcatcgaacgtgtttctggattcagtcccttcaaacacgaatcgattccaggtgtccgtcattaacgaaaaccatgaatcgtccgcagccgcagacgataataccgatcctcctcattacgaagaaacctcgttcggtgatgaggcccagaagcggctcagaatatcttttcgcccaggaaatcaagaatgttacgataacttccttcagagcggagaaacggccaagaccgatgcctcattccatgcatacgatagccacactaacacttactacttgcaaacctttggtcacaacaccatggatgcagtgcctaagattgagtattaccgcaacacgggatcaatctcaggtccaaaggtgaacagaccctccctccttgaaattcacgagcaacttgcgaagaatgtcgccgtgactccaagctcagcagaccgtgtggcaaacggcgatgggattccaggagatgagcaggccgagaataaggaagatgatcaagcaggtgttgtcaaatttggatgggtgaagggggtcctggtgcggtgcatgctgaacatttggggtgtgatgctgtttatacggttgagctggattgtgggtgaagcgggaattgggctgggagtcatcattattggcctttccgtagtggtcactactctgactggcatatcgatgtcggcgatttgtactaacggggtggtgcgaggtggtggagcgtactaccttatttcgcgttccctcgggcctgaatttggaggttcgattggattgatctttgcatttgcaaacgccgtggcggtcgcgatgtacgtagtgggtttcgcagaaaccgtggtggatcttctgaaggaatcggattcgatgatggtggatccaaccaacgatataaggatcattggctcgatcaccgtggtgatattgctcggaatttcggtggccgggatggaatgggaggcgaaagcccaagtgattctgcttgtcatactcctgattgcaatagcaaacttctttatagggaccgtgatccccagcaataacgaaaagaagagccgaggctttttcaactaccaagcatccatttttgctgaaaactttggaccgcggtttaccaaaggagaggggtttttctccgtgtttgcaattttcttccctgccgcaactggaatccttgcaggtgcaaacatttcgggcgaccttgaggacccgcaggatgcaatcccacgcggaactatgctggccatctttatcaccaccgtggcctacctgggagtggcaatatgtgtcggcgcatgtgtggtgagagacgccaccggcaacatgaacgataccattatctcaggaatgaattgtaacggctcggcggcttgcggcctgggctacgatttttccaggtgtagacacgagccctgccaatacggacttatgaacaacttccaggtcatgagcatggtgtcgggcttcgggcccctcattaccgcaggtattttctcggctaccctctccagcgcacttgcatcgcttgtctcagctcctaaggtgtttcaggcgttgtgtaaggataacatatacaaagccctgcaattcttcgctaaggggtacggcaaaaacaatgaaccacttagaggatacatcctcacgtttcttattgcgatggcattcattctgattgcagaactcaacaccatcgcacctatcatttccaacttcttcctggcctcatacgcattgattaacttttcctgcttccatgcttcctacgcaaaatctccaggatggcgtcctgcatacggaatttacaacatgtgggtcagtttgtttggagcggtgctttgctgtgcagtgatgtttgtgatcaactggtgggcggcagtgattacctacgtcatagaattcttcctttacgtgtatgtgacctgcaagaaacccgatgttaactggggatcctccactcaagcactttcatacgtctcagctcttgacaacgcactcgagctgaccacggtggaggatcatgtgaaaaacttcagaccccagtgcattgtgcttaccggcggaccaatgacgcgacccgcactcctcgatattactcatgcattcactaagaattcaggactgtgcatatgctgtgaagtgttcgtgggccctaggaagctctgtgtcaaggagatgaactcaggaatggccaagaaacaggcctggctgatcaaaaacaaaatcaaggccttctacgccgccgtcgcggcagattgttttcgtgatggtgtgaggtcgctgcttcaggcctccggtctgggacggatgaaaccaaatactcttgtgattggatacaaaaagaattggcggaaagctccacttaccgaaatcgaaaactacgtggggatcattcatgacgcatttgactttgaaatcggagtcgtcatcgttagaatttcccaaggatttgatatatcgcaagtgctgcaagtccaggaagaacttgaacggcttgagcaggaacgcctggcactggaagctaccataaaagacaatgaatgcgaggaagagtcgggtgggatcaggggcttgttcaagaaggcaggtaaattgaacattaccaagactacccccaagaaggatggctccataaacacgagccaatccatgcatgtcggtgaattcaatcaaaagctcgtggaggcttccacccaattcaagaagaaacaggagaagggaaccatcgacgtgtggtggcttttcgatgatggaggactcactcttcttataccttacatactgactctccgcaagaagtggaaggactgtaagctgaggatctacgtcgggggtaaaatcaatagaatcgaagaagaaaagattgtgatggcctccctccttagcaagttcaggatcaaatttgcagacattcatatcatcggtgacattaacattcgacctaataaggaatcgtggaaggtctttgaagaaatgattgagccttaccgtctgcacgaatcgtgtaaggatctgactaccgccgagaaattgaagagagagactccttggaagattacggacgctgaacttgaggcagtcaaggaaaagagctataggcaggtccgccttaatgaactcctccaagaacattcacgtgcagcaaaccttattgtcctctcgctgccagtcgccagaaaagggtcaattagcgatcttctttacatggcatggctcgagatcctgactaagaatcttcctcctgtgctcctggtgcggggtaaccataagaatgtgcttaccttttactca

SEQ ID NO: 251125 - DNA, 3297 bp, synthetic construct
  misc_feature 1..3297: note = Description of Artificial Sequence: Synthetic coding sequence
  source 1..3297: mol_type = other DNA
atgtctctcaacaactccagcaacgtgttcctggactcggtcccgtcgaacactaataggttccaagtttcggtcatcaatgagaaccacgagtccagcgccgcggccgacgacaacacggatcctccccactatgaagaaacttcattcggagacgaagcccaaaagagactcaggatctccttccgaccgggcaaccaggaatgttatgataacttcctccaatcgggcgaaactgccaagactgatgcttcgttccacgcctacgattcgcataccaacacctactacctgcagacctttggacacaatactatggacgcggtgccaaagatcgagtactaccgcaacactgggtcaatcagcgggccaaaggtgaaccgcccgtcgctcttggaaatacacgagcagctggcgaagaacgtggcggtgactccgagcagcgccgacagggtggccaacggagatggaatcccgggagatgagcaggccgaaaataaggaagacgaccaggctggcgttgtgaagttcggatgggtcaagggagtgcttgtccggtgcatgctgaatatctggggagtgatgctttttatccgactctcgtggatcgtgggagaggctggtattggactgggagtcatcatcatcggcctctctgttgtggtgaccactctgactggaatcagcatgtctgccatctgcactaacggggtggtgcggggtggtggagcatattacctgatcagccgctccttgggacctgaattcggagggtccattggactgatcttcgccttcgctaacgctgtggcagtcgcgatgtacgtggtgggtttcgccgaaaccgtggtggacctcctgaaggagtccgactccatgatggtggatccaaccaacgacatccggatcatcggatccattaccgtggtgatcctgctggggatctcggttgcgggtatggagtgggaggccaaggcacaagtgattcttctggtcattctcctgatagctatcgcgaactttttcattggaaccgtgattccaagcaataatgaaaagaagtcacggggcttcttcaactaccaggctagcatcttcgcagagaacttcggacctagattcactaagggagagggattcttcagcgttttcgctatcttcttccccgcagctactggcatcctcgcgggagccaacatcagcggagatctcgaggatccccaggacgctattccccgcggaaccatgctggccatctttattacgaccgtggcgtacctgggcgtggcgatctgcgtcggggcttgcgtggtcagagacgccactggaaatatgaacgataccatcatctcagggatgaactgtaacggctcggccgcctgcggactgggatacgatttttcacgctgcagacacgaaccgtgccagtacgggcttatgaacaatttccaggtgatgtcgatggtgtcgggattcggaccgctgatcactgctggcatcttcagcgccaccctctcctcggcgctggcctcgttggtgagcgccccgaaagtgttccaagcactgtgcaaggataacatctacaaggcgcttcaatttttcgcaaagggatacggcaagaacaatgaaccgctgcgcggctacattctgacgtttttgatcgccatggcgttcatcctcatcgccgagctgaataccatcgccccaatcatctctaactttttcctggcatcgtacgccctgatcaatttctcatgtttccacgccagctacgcaaagtcaccaggatggaggccggcttacggtatttacaacatgtgggtgtcactgtttggagcagtgctgtgctgcgccgtgatgtttgtgattaactggtgggcagcggtgatcacctatgtgatcgaattcttcctgtacgtctacgtgacttgcaaaaagccagatgtgaactggggttcatccactcaggcattgtcatacgtctcggcactggacaatgccctcgaactcactaccgtcgaggatcacgtgaagaatttcaggcctcaatgtatcgtgctgactggaggacctatgaccagaccggccttgttggacattacccatgcgttcactaagaatagcgggctctgcatctgttgtgaggtgttcgtgggacctcgaaagctgtgcgtgaaggagatgaactccggaatggctaagaagcaggcctggcttatcaaaaacaaaatcaaagcattctacgccgccgtggccgcggactgctttagagacggggtgcgctccctgctgcaagcgtcagggctgggtcggatgaaaccaaatacgctggtcatcggctacaaaaagaactggcgtaaggccccgcttactgaaatcgagaattacgtgggaatcatccatgatgccttcgacttcgaaatcggagtggtgatagtcaggatttcccaaggattcgacatttcccaggtgctgcaagtgcaggaagagctggaaagactcgaacaggaacggctggcgctggaagcaactatcaaggataatgaatgcgaagaagaaagcggaggaattcgcggcctgtttaagaaggcaggaaagctgaatatcacgaagaccactcctaagaaagacggctcaatcaatacctcccagtccatgcacgtcggagagtttaaccagaagctggtcgaagccagcacgcaattcaagaaaaagcaagaaaaaggtaccattgacgtctggtggctgtttgatgatggaggcttgaccttgttgatcccttacatcttgaccctgcggaagaagtggaaggactgcaagctccgaatctacgtgggaggaaagatcaaccggatcgaggaggaaaagatcgtcatggcgtccctgctgtccaagttcaggatcaaattcgcagacatccacatcattggcgatatcaatatccgcccgaataaggagtcctggaaagtgtttgaagaaatgatcgagccttatcggctccacgagagctgcaaggatttgaccactgcagaaaaactgaaacgcgagactccatggaagatcactgatgccgagctggaggcggtgaaggaaaaatcctacaggcaggtccgcctgaacgaactgctgcaggaacacagcagggccgccaacctcatcgtgctctcactgccagtcgcccgcaagggtagcatctcggaccttctgtacatggcctggctggaaattcttaccaaaaacctgccaccggtcctcctggtgcggggcaaccacaagaatgtccttactttctactca

SEQ ID NO: 251126 - DNA, 3297 bp, synthetic construct
  misc_feature 1..3297: note = Description of Artificial Sequence: Synthetic coding sequence
  source 1..3297: mol_type = other DNA
atgtccttaaataactcctccaacgtctttttggattctgtaccttcgaacaccaatcgtttccaggtatctgtgatcaatgagaatcacgagtcttctgcggccgccgacgacaacacggacccaccgcactacgaagagaccagctttggggacgaagcccagaagcgactccggatcagttttaggccgggcaaccaggaatgctatgataacttccttcagagcggagagaccgcgaaaacggatgcatcttttcatgcctatgattcacacacaaatacgtattatcttcagactttcgggcacaataccatggacgccgtgcctaaaatcgaatattacagaaataccggaagcatctcaggccccaaggttaatcggcccagcctactggagattcatgaacagctggcaaagaacgtggcagtcactcctagtagcgctgatcgagtcgccaatggggacgggattccaggggatgagcaggcagagaataaggaagatgaccaagcaggggtggtcaagttcggatgggtcaagggtgtgctagtgagatgtatgctcaacatctggggcgtgatgttgttcatcagactctcatggatcgtaggagaagcagggattggattgggcgtcattattatcggtctttccgtcgtagttaccacccttacggggattagcatgtcagcaatttgtaccaacggcgtggtccggggaggaggcgcctactacctgattagccggagtctgggccctgagtttggggggtccattggactcattttcgcttttgctaatgcggtggccgtcgctatgtatgtcgtgggcttcgcggagacagtggtggatctcttgaaagaaagtgattccatgatggtcgaccccactaatgacatcaggatcatcggttccattactgttgtgatcttgctcggaatttccgttgccggcatggagtgggaagctaaggctcaagtgattttgttagtgattttactgatagcgatcgctaactttttcattgggactgtgatcccttccaataacgaaaagaagtcacggggctttttcaattaccaggcctcaatattcgcagagaacttcgggccacgcttcactaagggagagggctttttctccgtgtttgcaatctttttcccggccgcgactggcattttggctggcgctaacatctctggagatttagaggacccccaagacgcgattccccggggcacaatgttggccatcttcatcactacagtggcttatctcggggtggctatctgtgttggagcttgcgtagtgcgagatgcaaccgggaacatgaacgacacgataatttctgggatgaattgtaacgggtccgccgcatgtggactaggatacgactttagcagatgtcggcacgagccatgccaatatgggctgatgaacaattttcaggtgatgtccatggtctccggcttcggaccgctgattactgcaggcatctttagtgccaccttgtcaagtgcacttgcttctctcgttagtgcccctaaggtgttccaggccctgtgcaaggataacatatacaaggctctacaattttttgcgaaggggtacggaaagaacaatgaaccattgcgaggatatatcctaaccttccttattgctatggcctttatcctaatcgccgagctgaacactatcgctccaattatctccaacttcttcctcgcgtcgtacgcccttatcaatttcagttgctttcatgccagctacgcaaagtcccccgggtggcgtcctgcctacggcatctacaacatgtgggttagtctgtttggcgctgtgctgtgctgcgctgtgatgtttgtgataaactggtgggccgcagtaatcacttatgtgatcgaatttttcctatatgtgtatgtgacctgtaagaagccagacgttaattggggtagttccacccaggcacttagctatgtgtccgcactcgacaacgcgttggaactgaccacggtggaggaccatgtcaagaacttcaggcctcagtgcattgtgctgacaggaggacctatgacccgccctgctctcctcgacattacccacgctttcaccaagaattccggcctatgtatctgttgtgaggtgtttgtgggaccgcggaagctgtgcgttaaggaaatgaattccggcatggctaagaagcaggcttggcttatcaagaacaaaatcaaggccttttacgccgcagtggctgctgattgctttcgggacggcgttcgttcactgctgcaggcctccggcttgggccgcatgaaaccaaacacactggtcataggatataagaagaactggaggaaggctccactgaccgagatcgaaaattacgtcggcataatccatgacgcttttgactttgagatcggagtggtcatcgtcagaatatcacaggggttcgacatcagtcaggtactgcaggttcaagaagaattggaacggctggaacaggaaagacttgcactggaagcgactattaaggataacgaatgcgaggaagagtccggagggatcagaggcctgtttaagaaggccggaaaattaaacattacaaagactacccctaaaaaagacggatcaatcaacacaagtcagtctatgcatgtgggggagttcaaccagaagctcgtagaagcttccacccagttcaagaaaaaacaggaaaagggtacaatcgatgtatggtggttgtttgatgacggcggtctcacgctgctgatcccatacatcctgaccctccgcaagaaatggaaagattgtaaactacgcatctacgtaggcgggaagatcaatcggattgaagaggaaaagatagtgatggctagtctgctcagcaagttccggatcaaatttgcagacatccatatcatcggcgacataaatattagaccaaataaggagagctggaaggtgttcgaggaaatgattgagccctacagactgcacgagagctgcaaagacctgaccacagcggagaagttgaaaagggagacaccgtggaagatcacggacgctgagctcgaggccgtgaaagagaagtcctatagacaagttagattaaacgagctgctacaggagcattcccgggctgccaatttaatcgtgctctctcttcctgtcgctcggaaagggagtatttctgacctgctatatatggcatggctggagatcctcacaaaaaacctgccccccgtcctgctggtaaggggcaaccacaaaaatgtgctgactttttatagt

SEQ ID NO: 251127 - DNA, 3297 bp, synthetic construct
  misc_feature 1..3297: note = Description of Artificial Sequence: Synthetic coding sequence
  source 1..3297: mol_type = other DNA
atgagccttaacaattcttccaacgtctttctcgacagcgtgccaagtaatactaaccgattccaggtctcagtgattaatgagaatcacgagtcttctgcagcagccgacgataatactgaccccccccactacgaggagacaagttttggtgacgaagcgcagaaaaggctgcgtatcagctttcggcctggaaaccaagagtgttacgataactttttacaaagcggcgagacagccaaaactgacgccagttttcatgcgtatgacagccataccaacacctactatctacaaacctttggccacaacaccatggatgccgtgcccaaaatcgaatattacaggaatacagggtctatctctgggcctaaagttaacaggccatctcttctagagattcatgagcagctggcgaagaacgtggctgtgactcctagctctgccgaccgggtagcaaacggcgacgggataccaggggacgaacaggccgaaaataaagaagatgatcaggccggggttgtcaagtttggctgggtcaaaggcgtgctggtcaggtgcatgttaaacatctggggtgtcatgctgttcatccgcctgagctggatcgtgggtgaagctggaatcggcctgggggtgatcattatcggactttccgtggtggtcacaaccctcacgggcatatctatgtcagcaatctgtaccaacggagtcgtccggggaggcggagcctactatcttattagcagatccttgggccccgaatttggaggctctataggtttgatatttgcgttcgcaaatgcagtcgcagtggccatgtatgtcgtgggcttcgccgagacagtcgttgacctcctgaaagagtcagactccatgatggtggaccccaccaatgatatcagaattattggatcaatcaccgtggtgatacttctgggaatttctgtggctggcatggagtgggaagccaaagcccaagtcattctgcttgttatcctcctgatcgccatcgctaatttctttattggcacagtcattccctctaacaatgagaaaaagtctcgcggtttcttcaattatcaggcatctatcttcgcagaaaacttcggccctcgtttcacaaagggtgagggtttttttagtgtgttcgccatttttttccccgctgccaccgggatcttggcaggggccaatatcagtggagacctcgaggacccccaagacgccatcccacgcggcacaatgctggctatctttatcactacagtggcttacttgggggtagcaatctgtgtgggtgcctgcgtcgtaagggacgccacaggcaacatgaacgataccattatcagtggcatgaactgtaatgggtccgccgcgtgtggactcggttacgacttctccagatgcaggcacgaaccgtgccagtacggcttaatgaataacttccaagtcatgtccatggtttccggtttcgggcccctcatcacggcaggcatcttcagcgccactctatcttccgccttggcatctttggtgtcagcccccaaagtatttcaagcattatgcaaggacaatatctacaaggccttgcagttttttgcaaaagggtacggcaagaataatgagcccctccggggatatattctgaccttcttgatcgccatggctttcatcttaattgccgagttgaacacaattgccccaatcattagcaatttcttcttggcaagctatgcccttatcaacttctcttgttttcacgcgtcatacgccaaatcacccggttggcggccagcatacggtatctacaacatgtgggtgtccctgttcggtgccgtgctctgttgcgccgttatgttcgtgattaattggtgggcagccgtgattacctacgtgatcgagttctttctgtacgtttatgtgacctgcaagaagccagacgttaactggggtagctcaacccaggctctctcgtatgtttccgcgttggataatgcccttgagctcacgactgtggaggatcacgtcaagaattttaggccccagtgcattgttctgacggggggtcccatgacacgccctgccctgcttgacatcacccacgcatttacgaagaactcaggcctgtgcatctgttgcgaggtgttcgtgggcccacgtaagctctgtgtaaaggagatgaacagcggaatggcaaagaagcaggcttggctgattaagaacaaaattaaagctttctacgccgcggtcgccgcggactgtttccgtgatggcgtgcgcagcctgctgcaggctagcggcctggggcgcatgaaacccaacacactggtcatcggatataaaaaaaattggcgaaaggcgcccctgacagagatcgagaactatgtgggtattattcatgatgccttcgacttcgagattggcgtggtcattgtgcgaataagccagggtttcgacatcagccaagttctgcaggttcaagaggagctcgagcgcctggaacaggaaaggctggcactagaagcgacgattaaagacaacgaatgcgaagaagagtccggcggtatccgcggtctgttcaaaaaagccggcaaactcaacatcacaaagaccactcccaagaaagatgggagcatcaacaccagccagtccatgcacgtaggggaatttaaccagaagctcgtggaggcttcaacccaatttaagaagaaacaggagaaaggaactattgatgtctggtggctgtttgatgatggaggactgaccctgctcatcccatacatcctgacgctaagaaaaaagtggaaagactgcaagctcaggatttacgtgggaggcaagattaacagaatagaagaagaaaagattgtgatggcctccctgctgtccaagttcagaatcaaattcgcagatatccacattataggggacattaacatacgacccaacaaagaatcctggaaggtgttcgaggaaatgatagaaccctaccgcctccatgaaagctgcaaggacctgactaccgcagagaagcttaagagagagaccccctggaagatcaccgatgctgagctggaggccgtgaaagaaaaatcatacaggcaggtgcggttgaacgagcttctccaggagcatagccgcgctgcgaacttgatcgtcctgagcctgcccgtcgcccggaaagggagcatcagcgatttgttatacatggcatggcttgagatactgactaaaaatttgccacctgtgctactggtcagaggcaatcataagaatgtgttgaccttttactct

SEQ ID NO: 251128 - DNA, 3297 bp, synthetic construct
  misc_feature 1..3297: note = Description of Artificial Sequence: Synthetic coding sequence
  source 1..3297: mol_type = other DNA
atgtctctgaacaattcctctaacgtctttttggactccgtcccaagcaacactaaccgtttccaagtttccgtgattaatgaaaatcacgagtccagtgcggctgctgacgacaatacagaccccccacactatgaagagacttccttcggcgacgaagcacagaagaggcttcgtatctcattccgccccgggaatcaggaatgttatgacaacttcctgcagtcaggggaaaccgccaaaaccgatgccagcttccatgcttacgactcccacactaacacctattatctgcagaccttcggacacaacactatggatgccgttcctaagatcgagtactatcgcaacaccggaagtattagcggcccaaaagtgaaccggccctccctactcgaaatccatgagcagctagccaagaatgtcgctgtcacaccatccagcgcagatcgggtggccaatggggatgggatacccggggatgaacaagcagaaaacaaggaggacgatcaggccggggtcgtcaaattcggctgggttaaaggggtactggtgagatgtatgttaaacatttggggcgtgatgctgttcatacgtttgtcttggattgtgggagaagccggtatcggacttggcgtaataatcatcggtttgagcgtggttgtcactacactgacgggcattagtatgtcagcaatatgtacaaacggagtggtaaggggtgggggcgcctactacctaatcagtaggtcactggggccggaatttggcggctccatcggtctgatctttgcgttcgccaatgctgtggccgtggctatgtatgtggtaggattcgctgaaacagtggttgatttgctgaaagaaagcgattcaatgatggttgaccccacgaatgatattcgcatcattggatctattactgtcgttatccttctaggaatttcagtggctggcatggaatgggaagctaaggctcaggtcatcctgctggtcattctccttattgccattgcaaacttttttataggcactgtgataccgtctaataacgaaaaaaagtcaagggggttcttcaattaccaggcaagcatttttgctgaaaactttggaccccggttcaccaaaggtgaaggcttttttagtgtctttgctatattctttcctgcagccacaggcatcctggcgggtgctaacatttccggggacctggaggaccctcaggatgctatcccgagaggcacaatgctggcgattttcattacaacagtggcgtacctgggcgtggcaatttgtgtgggagcctgcgtggtccgagacgccacgggaaatatgaatgacacaattatctccggaatgaactgcaacggcagcgccgcttgcggacttggttatgatttctccagatgccgacacgaaccctgccagtatgggctcatgaacaatttccaagtgatgtcaatggtaagtggcttcggacccctaatcactgcgggaatcttctcggccaccctctcctctgccctagcaagtctggtgtccgcacccaaggtgtttcaggctctgtgcaaggataacatctacaaggcccttcaattcttcgccaaaggctacggtaagaacaacgaacctctgcgaggatatattctgaccttcttaatcgcaatggcgttcattctcattgccgagctgaataccatcgcacccatcattagcaacttcttccttgcttcctacgccctaataaacttcagttgctttcatgcgagctacgcgaagtcccctggatggagaccagcctatggtatatataatatgtgggtgtcactgtttggggccgtgctgtgttgcgcagttatgttcgtaatcaactggtgggctgcggtgattacgtacgtcatcgaattctttttgtacgtgtatgtgacctgtaagaagccagacgtgaactggggatcctcaacccaggccctcagttacgtgagcgctcttgacaatgccctagaactcactaccgttgaagaccatgtaaaaaacttcaggccccaatgtatagttctgactggaggtccaatgacaagacctgctcttttggatatcactcacgcattcacgaagaactccggactctgcatatgctgcgaggtcttcgtaggacccagaaagctgtgtgttaaggagatgaatagcggaatggccaagaaacaggcctggctgattaagaataagattaaagccttttatgctgcagtggctgccgattgttttcgagatggggtccggtctctactgcaagcaagtggactcggccgaatgaaaccgaataccctggtgatagggtataaaaaaaactggcgaaaggccccactgaccgaaatagagaactacgtcggcattattcacgatgctttcgacttcgaaattggggtcgtgattgtgagaattagtcaggggttcgacatcagtcaggtgcttcaggtgcaggaggaactcgaacgtctggagcaggagaggctcgcgttagaggctaccattaaagacaatgaatgcgaggaagaatccggggggattaggggtctatttaagaaagccggaaagctcaatataaccaagaccacacccaagaaggacggctctattaacactagtcagagtatgcatgtgggtgaattcaaccagaaactcgtcgaggcgagcacgcaattcaagaagaaacaggagaagggaaccatcgacgtgtggtggctctttgatgacgggggacttaccctgctgatcccctatattctcacgctgcgcaagaaatggaaagattgtaaactgagaatctatgtgggcggaaagatcaatagaatagaggaggagaaaatcgttatggcatcactgctgtctaagtttcgaattaaattcgccgatatccatatcatcggcgacatcaatatacgaccgaacaaggaatcctggaaagtctttgaagagatgatcgaaccttataggctgcacgagtcctgcaaagacctgaccacagcagagaaactgaagcgagagaccccctggaagatcaccgatgccgagcttgaggcggtgaaggagaaaagctatcgacaggtgagactcaatgagctgcttcaggagcacagcagagccgctaatctgatagtgttgtcgctgccggtcgccaggaaaggttcaataagcgatctgctgtacatggcttggctggagatcctgactaagaacttaccacccgttctgttggtaagaggtaatcataagaacgtgttgactttttattcg

SEQ ID NO: 251129 - DNA, 3297 bp, synthetic construct
  misc_feature 1..3297: note = Description of Artificial Sequence: Synthetic coding sequence
  source 1..3297: mol_type = other DNA
atgtccctgaacaattcttctaatgtgttcctcgattccgtgccatctaatacaaatcgatttcaggttagtgtcatcaacgagaatcatgagtcctctgcagccgccgacgacaataccgatccacctcactacgaggaaacctcctttggagatgaagctcagaagagactgagaattagtttccgtcccggaaatcaggaatgttacgacaatttcctgcagtccggcgaaaccgcgaagacggatgcgagctttcatgcttacgattcccatacgaatacatattatctgcaaactttcggccacaataccatggacgctgtgccaaagatagagtactacagaaacacgggttcaatttcaggtcccaaagtaaatagaccaagtctgctggagattcacgagcagctggcaaaaaatgtggctgtaactcctagctcagcagaccgagtcgccaatggggacggtataccaggggatgagcaggccgagaacaaggaggatgaccaggctggcgtggtcaagttcgggtgggtgaagggcgttttggtccgatgcatgttgaatatttggggtgttatgctctttattagactgagctggatcgtgggagaagccggtataggcctcggagtgatcatcataggattaagtgttgtggttaccaccttaacagggatctccatgtccgcaatttgcacaaatggcgtggtaaggggcggaggcgcctattacctaatcagccgaagcctggggccggagtttggcggcagcatcgggctcatctttgcatttgcgaacgctgtggctgtcgccatgtacgtggtcggcttcgcagagactgtcgtggacctgttaaaagaatcagattccatgatggttgaccctacaaacgatatccggatcatcgggtctattaccgtggtgattctccttggaatttcagtggccggcatggagtgggaagctaaagcccaggtaattctcctggtcattctccttatcgctatcgccaatttttttatcggcacggtgatacccagcaacaacgagaagaagagtagggggttctttaattaccaggctagcatttttgcagagaacttcggccctcggttcaccaagggggaaggttttttcagcgtatttgcaatctttttcccagccgctactgggatcctcgctggtgccaacatctctggggacttagaagatcctcaagatgctatcccccgcggcactatgttggcaatcttcattacgacggttgcctacctgggcgtagccatctgcgtgggagcgtgcgtcgttagggacgccactggcaatatgaacgacactattatctctggcatgaactgcaatggaagcgcagcatgcgggcttgggtacgacttttctcgttgcaggcacgaaccctgtcagtacgggctgatgaacaacttccaggtgatgtccatggtctctggcttcggccctctcatcaccgccggaatattcagtgcgacgctctcctccgctctcgcctctcttgtgtcagcacccaaagtctttcaggccttatgcaaggataatatttacaaagccttacaattcttcgctaaagggtacggaaaaaataacgagcctttgcgggggtacatcctaacgttcctgattgccatggcctttattcttatcgccgagctgaacaccatcgcacctattattagcaacttctttttagcttcctatgccctgataaattttagctgcttccatgcttcctacgcaaagtcccccggctggcggcctgcatatgggatttataatatgtgggtgagcctctttggcgcagtgttatgctgtgcggtaatgtttgttataaactggtgggccgctgtcataacttacgtgatcgagttttttttgtatgtgtacgtcacttgcaaaaagcctgatgtgaattgggggagctccactcaggccttgagctatgtgagtgctctggataacgcacttgagttaaccacggtggaggaccacgttaaaaactttagaccacagtgtattgtgctgacaggtggccccatgaccaggcctgcactgttggatatcactcacgcctttaccaagaactcaggactttgtatttgttgtgaagtgtttgttgggccccgcaagctgtgtgttaaagaaatgaactcaggcatggccaagaaacaggcgtggctcattaagaacaaaataaaggcgttctatgccgccgtggcagccgactgcttcagagatggggtacggagcctgctccaggcttccgggttaggcaggatgaagcctaacactctggtcatcgggtataagaagaattggcggaaagcaccactcacagaaattgagaactatgtgggaataatccacgatgcctttgatttcgaaatcggggtagttatcgttcggattagccagggattcgatatttctcaagtgttgcaggtgcaggaggaactcgagaggctcgagcaggagcgcctggccttggaagccaccatcaaagacaacgaatgcgaggaggagtctggcggcatccgaggattgttcaaaaaggccggtaagttgaatatcaccaagaccaccccaaagaaagatggttctattaacacctctcagtcaatgcacgttggggaatttaatcagaagctggtagaagcgtccacccagtttaagaaaaaacaggagaagggtacgatcgatgtgtggtggttgtttgacgatgggggtctgactctgctcataccttatattctgactctgagaaagaaatggaaggactgcaagctgaggatctatgtgggcgggaaaattaataggatcgaggaggaaaagattgttatggcttccctgttgtcaaagtttcgcatcaagtttgccgatatacatatcataggtgatattaacatccgtccgaataaggagagctggaaggtgttcgaggaaatgattgaaccatacaggttgcacgaatcttgcaaagacttgactaccgccgagaagctaaaaagggagaccccctggaaaataactgacgctgaattggaggccgtgaaagaaaaatcgtatagacaggtcagactcaacgagcttctccaggaacactcccgggccgccaatctgatagttctgagcttgccggtggcaagaaagggttccatttcggatttgctctacatggcctggctcgagatcctcaccaaaaacctcccacccgtgctcctggtaaggggcaaccacaagaatgtcctgactttctattct

SEQ ID NO: 251130 - DNA, 3297 bp, synthetic construct
  misc_feature 1..3297: note = Description of Artificial Sequence: Synthetic coding sequence
  source 1..3297: mol_type = other DNA
atgagcctcaataacagtagcaacgtgtttctggactccgtgcccagcaacactaataggtttcaggtgtcggtgatcaatgagaaccacgagtcatcggcagcagcagacgataatacggatcctccccattacgaggaaactagcttcggagatgaggcgcaaaagcgccttcgtattagcttcaggcctggaaaccaggaatgttacgacaattttcttcaatccggtgagacggccaagactgatgcatcttttcatgcttacgattcacataccaatacctactacctgcaaacttttggacataatactatggacgcagtgccgaaaatagaatactaccggaataccggatcgatttcgggacctaaggtgaacagaccatccctccttgagatacatgaacagctggcaaagaatgtggcagttaccccttcctccgcagatcgcgtggcaaacggggacggtattccaggggatgaacaggccgagaacaaagaagatgatcaggcaggagtggtgaagttcggatgggtgaagggagtcctggtgaggtgcatgctcaacatttggggcgtcatgcttttcatacgactcagctggatagtcggtgaggcaggcatcggactgggagtgattatcattgggcttagcgtggtggtgactaccctgactggtatctcgatgagcgcaatttgtactaatggtgtggtgcgcgggggcggcgcctactacttgatctcaaggagcttgggaccagaattcggtggttccatcggactgatcttcgcctttgcgaatgcagtggcagtcgccatgtacgtcgtgggttttgcagaaacggtcgtggacctgctgaaggaatccgactccatgatggtagatccaaccaatgacattcgcatcataggatcgattaccgtggttattctcttgggaatttccgtggcaggaatggaatgggaggccaaggcacaggtgattcttcttgtgattctgctgatagctatcgcaaacttcttcataggaaccgtgattccttcgaataacgagaagaaaagcaggggattctttaactaccaggcaagcattttcgccgagaactttggtccaagatttaccaaaggagagggctttttcagcgtgtttgcaatattctttcccgcggctaccgggattcttgcaggcgccaacatatcgggggatctggaggatcctcaagatgcaatccctcgggggactatgctggcaatctttatcaccaccgtcgcctatcttggggtggcaatttgcgtgggagcatgcgtggtgcgagatgcaactggaaacatgaacgacactatcatttcgggtatgaattgtaacggcagcgccgcgtgcggactgggttatgatttttcgcgctgccgccacgagccgtgtcagtacggactcatgaataactttcaagtgatgtcgatggtcagcggatttggccctctgatcacggcaggcattttcagcgcaacgctctcaagcgcacttgcctctcttgtcagcgccccaaaggtctttcaggcactttgtaaagacaatatctacaaggccctccaattctttgcaaaaggatatggtaagaataacgaacccctgaggggatacattctcacctttctcattgcaatggcttttatcctgattgcagagcttaacacgatcgcacctatcatcagcaactttttcctcgcaagctacgccctgatcaacttttcctgttttcatgcctcgtacgcaaagtcgcctggatggcggccagcatatggaatctacaacatgtgggtgtccctgtttggtgcggtcctttgttgcgccgtaatgttcgtgattaactggtgggcagccgtgatcacttacgtgatagaattctttctttacgtgtacgtgacttgcaagaagcccgacgtgaactggggatcgtcgacccaagcgctgagctatgtgagcgcacttgacaatgcactggaactcactaccgtggaggatcacgtgaagaatttcagacctcaatgtatcgtgttgacggggggtccgatgaccaggccagctctcctggatatcactcatgcgtttacgaagaatagcggactttgcatctgctgtgaagtctttgtcggtcctaggaagctgtgtgtcaaggaaatgaatagcggtatggcgaagaagcaagcatggctcattaagaacaagattaaagcattttacgcagcggtggccgcggattgttttagagacggggtcagatcactcctgcaagcctcgggactgggtaggatgaaaccaaacaccctggtgattggttacaagaaaaactggcggaaggcaccactgaccgaaatcgaaaactatgtcggaattatccatgatgcatttgacttcgagataggggtcgtgattgtgcggatatcacaaggattcgatatctctcaggtgctgcaggtgcaggaggaactggaacgcctcgagcaggaacgccttgcacttgaggcaaccattaaggacaacgagtgtgaggaagaatccggaggtattcgtgggctcttcaaaaaggcaggaaagctgaatatcactaagacgacccccaagaaggatgggagcattaacacgtcgcagtcgatgcacgtgggagaattcaaccagaaattggtcgaggcatcgacccagttcaaaaagaagcaagaaaagggaaccatagatgtgtggtggctttttgatgatggcgggctcactctgctgatcccttacattttgaccctgcgcaaaaagtggaaagattgtaagctcagaatttacgtcggaggaaagataaacagaatcgaggaagagaaaattgtgatggcatcgctgcttagcaaatttcgaataaagtttgcggacattcacatcattggagacatcaatatccgcccaaacaaggaatcatggaaggtctttgaggaaatgatcgaaccttacagacttcatgaatcctgtaaggatctgactaccgcagaaaaactgaagcgcgaaaccccatggaagattactgacgcagagctcgaggcagttaaagaaaagtcctaccggcaagtgcgacttaatgaactgctgcaagaacactcgcgggccgctaacctgattgtcctttccctgccggttgcccgtaagggttcaattagcgacctcctctacatggcgtggctcgaaatacttaccaaaaacctgcctccagtgcttctggtcaggggaaaccacaagaacgttctcactttctacagc

SEQ ID NO: 251131 - DNA, 3297 bp, synthetic construct
  misc_feature 1..3297: note = Description of Artificial Sequence: Synthetic coding sequence
  source 1..3297: mol_type = other DNA
atgtccctgaacaattcctctaatgtgttcctcgactcagttccttcaaacaccaaccgcttccaagtgtccgtgatcaatgagaaccacgagtcaagcgcagcagcggacgacaatacggacccgccgcattacgaggaaacttcgttcggggacgaagcgcagaagcgcctgcgcatttccttcagacccgggaatcaggaatgctacgacaatttcctgcagtcgggagagactgctaagactgacgcctcgttccacgcatacgattcccacaccaacacctactatctgcaaaccttcggtcataacactatggacgctgtccctaaaatcgagtactatcgcaacaccggatcaatcagcggtccgaaggtcaacagaccgagcctgctggaaattcacgaacagctcgccaagaatgtggcagtcactccctcaagcgctgacagagtggccaacggcgacggcatcccaggagacgaacaggcggaaaacaaggaagatgatcaagcgggtgtggtcaagttcggatgggttaaaggagtgctggtgaggtgcatgctgaatatctggggagtcatgctgtttatcaggctttcctggatcgtgggagaagccggtattggattgggagtcatcattatcggactctcggtggtcgtcaccaccctcaccggcatctcgatgtcggcgatttgcactaatggggtggttcgtggcggtggagcctactacctgatcagccggtcgctcggcccggaattcggtggcagcattggactcatttttgctttcgcgaacgcggtggcagtcgccatgtatgtggtggggtttgcagaaaccgtggtcgatctgcttaaggagtcagactcgatgatggtggatccgaccaacgacatccggatcatcggctccatcaccgttgtcatcctgttgggaatctcagtggccgggatggaatgggaagctaaggcacaggtgatcctgctcgtgatcctgctgatcgccatcgctaacttcttcatcggaaccgtcatcccatctaataacgagaagaaatcgcgagggttcttcaattaccaggcttcaatcttcgccgaaaactttggcccgcgcttcaccaaaggagagggatttttcagcgtctttgccatctttttcccagccgccactggaattcttgctggcgcgaacatctcgggtgaccttgaagatccacaagatgccatccctcggggcaccatgctcgcgatattcatcactaccgtggcataccttggggtggcaatttgcgtcggtgcctgtgtcgtccgcgatgcaactggcaatatgaatgacactatcatcagcggtatgaattgcaatggcagcgccgcttgcggactgggatacgacttttcgagatgtcgccacgaaccttgccagtacggactcatgaataacttccaagtgatgtctatggtgtccgggttcggtccgctcatcaccgctggcatcttctcagctactctttcctcggcactggcgtcccttgtgtcagcccctaaagtgtttcaggccctgtgtaaagacaacatctacaaggcgttgcagttcttcgccaaagggtatggcaaaaacaacgaacctctgcggggttatatcctgactttcctgattgctatggcattcatcctcatcgccgagctcaacacgatcgccccaattatctcgaacttcttcctcgcgtcgtacgcgctcatcaacttctcctgcttccacgccagctacgctaaatctcccggttggcgccctgcatacggaatctacaatatgtgggtgagcctgttcggcgcggtgctctgctgtgcagtcatgtttgtgatcaactggtgggctgcagtgatcacttatgtcatagagttttttctctacgtttacgttacttgtaagaagccggatgtgaactggggatcgtcaacccaggctctcagctacgtgtcagccctcgacaatgcgctggaattgactacggtggaggatcacgtcaagaacttcaggccgcagtgcatcgtgctgacgggtggacccatgacccgcccagcacttctggacatcacccacgccttcaccaaaaactcaggactgtgcatctgctgcgaggtgttcgtgggccctaggaagttgtgtgtgaaagagatgaattccggaatggcgaagaagcaggcctggctgattaagaacaagatcaaggcgttttacgccgcggtggccgccgactgtttcagagacggcgttcggagccttttgcaagcgtcgggactcggacggatgaagccaaacacgctcgtcatcggctacaaaaagaattggcgcaaggcgccgctgactgaaatcgagaactacgtggggattatccatgacgctttcgatttcgagatcggcgtcgtgattgttagaatctcacaaggtttcgatatatcacaggtcctccaagtgcaggaagagctggaacgactggagcaagagcggcttgcccttgaggccacgataaaggacaatgagtgcgaggaagaatcgggcggcatccgcgggctgtttaagaaagcaggaaagctgaacatcactaaaaccactccgaagaaggatggctcaatcaacacctcgcaatccatgcacgtgggcgagtttaaccaaaagctggttgaagcgtctacccagttcaagaaaaaacaggagaaaggtaccatcgatgtgtggtggctcttcgatgatgggggactgaccctgctgatcccatacattctcacgttgcggaagaagtggaaggactgcaagctccggatctacgttggaggtaagattaatcgcattgaagaggagaagatcgtgatggcttccttgctgtccaagttccggatcaagttcgccgatatccacatcatcggagacatcaacattcggccgaacaaagaaagctggaaagtgtttgaggaaatgatagaaccctaccgcctccatgaatcgtgcaaggatttgactaccgctgaaaaactgaaaagagaaactccgtggaagattaccgacgccgagctggaagccgtgaaggagaaatcctacagacaggttagactcaatgagctgcttcaggaacattcacgcgcggcaaatctcatcgtgctgtcacttccggtggctaggaagggaagcatctccgacctgctttacatggcttggctggaaatccttaccaaaaatctgccgccggtgctgctcgtgcggggcaatcataagaacgtgctcaccttttactcc

SEQ ID NO: 251132 - DNA, 3297 bp, synthetic construct
  misc_feature 1..3297: note = Description of Artificial Sequence: Synthetic coding sequence
  source 1..3297: mol_type = other DNA
atgagcctgaacaattccagcaacgtgtttctcgattcagtgccatccaatactaacagatttcaagtgtcggtgattaacgaaaatcacgaaagcagcgctgccgccgatgataacaccgatcctccacactacgaggaaactagctttggtgatgaagcacagaagagacttcgaatcagctttagaccggggaatcaagaatgttacgacaactttctgcaatcaggtgaaactgccaagaccgacgcatcgtttcatgcctacgactcgcatacgaatacctactaccttcaaacctttgggcacaataccatggatgccgttccaaagattgagtactacaggaataccggatcgattagcggtcctaaagtaaacaggccttctctgttggaaattcatgaacagctggcgaaaaatgtggccgtgacgccctccagcgccgatagggtggcaaatggagatggaattccaggagatgagcaagcagagaacaaagaggatgatcaggcaggtgtcgtgaagttcggttgggtgaagggagtgttggtccggtgtatgctgaacatatggggcgtgatgctcttcatccggctttcgtggattgtaggcgaagccggaatcggtttgggtgtcatcataataggactcagcgtcgtggtcactaccctgaccggaatctccatgtcggctatttgtaccaatggcgtggtccgcggtggtggagcgtactatcttatttccaggagcctgggtcctgagttcggaggctccatcggtcttatctttgcattcgcgaacgcagtggcagtcgctatgtacgtggtgggatttgctgaaactgtggttgatctcctgaaagagtctgattccatgatggtggatcctactaatgacattcgcatcattggatcaataaccgtggtcattctccttggtatatcagtggcaggaatggagtgggaagcgaaggcccaggtcattcttctggtcatcctccttatcgccatcgccaatttcttcatcggcaccgtcattccttcaaacaacgaaaagaagtctcgtggattctttaactaccaagcatccattttcgcagagaatttcgggcctcggtttaccaaaggcgagggatttttctccgtgttcgcaattttcttccctgcagctactgggatccttgcaggagcaaacatatcgggggacctcgaagatccgcaggatgctatcccccgcggaactatgctcgccatcttcataacgactgtcgcatacctcggggtggccatttgtgttggtgcatgtgtggtgagagacgccaccggaaatatgaatgacacgattatctccggaatgaactgtaatggctcggcagcatgcggtctgggctatgacttttctcgatgcagacatgaaccttgtcagtacggactcatgaacaacttccaagtcatgtccatggtatccggattcggacctctcattacggcgggtatcttctcggcgacgctttcgagcgcactcgcatccctggtatcagcacctaaggtgttccaagccctgtgcaaggacaacatctataaggcactgcagttttttgcaaagggatacgggaaaaacaacgaaccattgagaggttacatccttaccttcctcattgcaatggcatttatccttatcgcagaactcaacacgatcgcacctatcattagcaatttctttctggcaagctacgcactgatcaacttctcatgttttcatgcgtcctacgcaaagtcgcccggatggcggccagcatacgggatttacaatatgtgggtgagcctttttggagccgtgctctgttgcgctgtgatgtttgtgattaactggtgggccgcggtgattacttacgtgattgaattctttttgtacgtgtacgttacgtgtaagaaacctgatgtcaactggggatccagcacccaggcactttcgtacgtgtcggccctggataacgcgcttgagctcaccactgtggaggaccacgtcaagaacttcagacctcagtgtatagtcctcaccggaggtccaatgacgaggccggcacttctggacattacccacgcatttaccaagaactcgggtctgtgtatctgttgtgaagtgtttgtgggaccacggaaactctgcgtgaaggaaatgaactcaggcatggccaaaaagcaagcctggctcatcaaaaacaagattaaagcgttttacgctgccgttgcggccgattgtttccgggacggagtgaggtcactgctccaagcatcgggacttggacgaatgaaacccaacaccctcgtgatcggttacaaaaagaactggaggaaggccccacttacggagatagagaactacgtgggtatcatacatgatgcctttgattttgaaatcggagtcgtgatcgtgcgtatttcgcaaggttttgacattagccaagtgttgcaggtgcaagaagaacttgagcgactggaacaggaacgcctggcactggaagccactattaaggacaacgaatgtgaagaggaatcaggtggaattcgaggtctgtttaagaaggcaggaaaactcaacatcaccaagaccaccccgaaaaaggatgggtccattaacacttcgcagagtatgcatgtcggtgaattcaatcaaaaactggtggaggcaagcactcagttcaaaaagaagcaagagaaaggaactatcgatgtgtggtggctgttcgatgacggaggccttactctgctgatcccttatatcctgactcttcgtaagaagtggaaggattgcaagctgcgcatctacgttgggggtaagattaacagaatcgaggaagaaaagatcgtcatggcatcgcttctgagcaagttccgcataaagttcgcggacattcacattatcggagatatcaatattcgtcctaacaaagaatcatggaaggtgttcgaggaaatgatcgaaccatacagactgcacgagtcttgcaaggacttgactactgcagagaagctgaagcgagaaaccccatggaagattaccgacgcagaattggaggcagtgaaggagaaaagctatagacaggttagactgaacgaacttctgcaggaacattcaagagcagccaacctcatcgtcctttcacttccagtcgcacggaagggttccatttcggacctcctgtacatggcgtggctcgaaatccttaccaaaaacctgccccctgtgctgctggtgcggggtaatcataagaacgtgctgactttttactca

SEQ ID NO: 251133 - DNA, 3297 bp, synthetic construct
  misc_feature 1..3297: note = Description of Artificial Sequence: Synthetic coding sequence
  source 1..3297: mol_type = other DNA
atgtcactgaataactcgtcgaatgtgtttctcgattcagtcccttccaatactaacaggtttcaggtgtcggtcattaacgaaaaccacgagtcgtccgcggcagcagatgacaatactgatccaccgcactacgaggaaacctcattcggggacgaagctcagaaacggttgcggatctcgttccgaccggggaaccaagagtgctacgataactttcttcaatccggagagactgcaaaaaccgacgcatcttttcatgcatacgatagtcacaccaacacctactaccttcagacctttggacataacaccatggatgcagttcccaaaattgaatactaccgaaataccggatcgatttccggaccgaaggtcaatagaccttccctgctggagatacatgaacagcttgcgaaaaacgtggcggtgacccctagctctgccgacagagtggcaaacggcgacggtatcccaggggatgagcaggcagaaaacaaggaggacgaccaggcaggagtcgttaagttcggttgggtgaagggcgttttggtgcgctgcatgctgaacatttggggagtcatgttgttcatccgattgtcctggattgtcggtgaagcaggaattggccttggcgtaatcattatcggtctttcagtggtggtgactactctcactgggatctccatgtcagcaatctgtactaacggtgtggtcaggggcggaggtgcgtattacctgatctcaagaagccttggacccgaattcggaggttccatcggattgattttcgcctttgcaaacgccgtggccgtcgctatgtacgtggtgggttttgcagaaactgtggtagatctcctgaaagaatcggactccatgatggtcgatccaactaatgatataaggatcattggctcaataaccgtggtgatcctgctcgggatctcagtagcagggatggagtgggaagcaaaggcacaggtgatacttcttgttatcctcctcattgcaattgccaacttctttatcggaaccgtgatcccttcgaacaatgaaaagaaatccagaggattctttaactaccaagcatccatatttgcagagaactttggaccaagatttaccaaaggagaaggtttcttttcggtgttcgccattttcttccctgcggccaccggcattctggccggagccaacatctctggtgatctcgaggacccgcaagatgctattcctagagggacgatgcttgcgatcttcattactaccgtcgcatacctgggggtcgctatttgtgttggagcatgtgtggtgcgcgatgctactggcaatatgaacgatacgattatctctggaatgaactgtaacggttcggcggcgtgtggcctcggatacgacttttcgaggtgcaggcacgagccttgtcaatacggactgatgaacaactttcaggtgatgtctatggtcagcggatttggtccacttattacggcagggatctttagcgcaaccctgtcctcagccttggccagcctggtcagcgcccctaaggtgtttcaagcactgtgcaaggacaatatctacaaggcgcttcagtttttcgcgaaggggtacggtaagaacaatgagcctctgcgcggctacattcttactttcctgattgcaatggcgtttatacttatcgcagaattgaacactatcgcgccaattatctcaaatttcttcttggcgtcttatgccctgatcaatttctcctgttttcacgcgagctacgctaagtcccccggatggcggcctgcatatgggatttacaatatgtgggtcagcctttttggcgcagtgctgtgttgcgcagtcatgttcgtgatcaattggtgggcagcggtgatcacttacgtgattgagttttttctgtacgtgtacgtgacttgtaagaagcctgatgtgaactggggatcctccactcaggccttgagctacgtgtcagctctggacaacgcacttgaactcaccaccgtcgaggaccacgttaagaatttcaggcctcaatgtatcgtgttgacgggtgggcctatgacccggcctgcactcctggatataactcatgcttttacgaagaacagcggactctgcatctgttgtgaggtgttcgtgggtccacgaaagctctgtgtgaaggagatgaactccggcatggcaaaaaagcaagcatggctcataaagaataagatcaaggcattttacgccgcagtggcagcagattgctttcgagacggtgtcagatcattgcttcaagcatcaggcctgggtcgcatgaaaccaaacactctggtcatcggttacaaaaagaactggcggaaggcacccttgaccgagattgagaattacgtgggaatcattcatgatgccttcgactttgaaatcggcgtggttatcgtgcggatttcgcaaggatttgacatatcgcaagtcctccaagtccaggaagaacttgaacgacttgaacaagaaagactcgcactcgaagcaactattaaggataatgagtgtgaagaggaatcgggaggaatccgtgggctgtttaagaaggctggtaagctgaacattaccaagaccacccccaagaaggacgggagcattaacacctcgcaatctatgcatgttggtgaattcaaccagaaacttgtagaagcatcgacccagtttaagaaaaaacaagaaaagggaaccattgacgtgtggtggctctttgatgatggcggactcactctgctgattccttacattctgacgctgcgcaagaaatggaaggattgtaagctgagaatatacgtcggtggaaagattaacagaattgaagaggaaaagattgtcatggcatcccttcttagcaaatttcggatcaaatttgcagatatacatatcattggggatatcaacatacgcccaaacaaagaatcatggaaagtgtttgaagaaatgattgaaccctacaggcttcatgaatcgtgcaaagatttgaccacggcagaaaagctgaagcgtgaaactccatggaagatcaccgatgccgaactggaggcggtcaaggagaagagctacagacaggtgagacttaatgaacttctccaagaacattccagagcagccaacctgatcgtgttgtccctcccagtcgcccgcaaggggtcgatatccgatcttctgtatatggcctggttggaaatcttgaccaagaatctgcctcccgtgcttctggtccggggaaatcataagaatgtcctgaccttttactcg

SEQ ID NO: 251134 - DNA, 3297 bp, synthetic construct
  misc_feature 1..3297: note = Description of Artificial Sequence: Synthetic coding sequence
  source 1..3297: mol_type = other DNA
atgtcgctgaacaacagctcgaacgtgtttctggactccgtgccctccaacaccaaccggtttcaggtgagcgtgatcaacgaaaaccacgagtcgtccgccgctgccgacgacaataccgaccctccacattacgaagaaactagcttcggagatgaagcacagaagcggctcagaatcagctttcgcccaggtaaccaggaatgctacgataacttcctgcaatcaggtgaaactgctaagactgatgcatcgtttcacgcgtatgactcccataccaatacctactacctgcagaccttcggacacaataccatggacgccgtgccgaagatcgagtactaccggaataccgggagtatctctggaccaaaggtgaaccggccgtcgctgttggaaatacacgaacaactggcaaaaaacgtcgctgttaccccatcctcagctgaccgcgtcgccaatggcgatggaatcccgggagacgaacaggccgagaacaaggaggacgaccaggcgggtgtcgttaagttcggttgggtgaagggagtgctcgtgagatgcatgttgaacatatggggggtcatgctcttcattcgcctttcgtggatcgtgggcgaagcgggaattggacttggggtgatcatcatcgggctctcggtggtggtgacgaccctgaccggaatctccatgtcggccatctgcacgaacggggtcgtgaggggaggtggggcatactacctgattagtcgctcgctgggtccggagtttggcggaagcatcggactcatcttcgcgttcgcaaacgccgtggcagtggccatgtacgtcgtgggattcgctgagactgtggtggatctgctgaaagaatccgactccatgatggtcgatccgactaatgacattaggatcataggatccatcactgtggtgatcctcctcggcatctcggtggccggaatggaatgggaggcaaaggcgcaggtgatcctgctggtgattctgctgatcgcaatcgccaacttcttcatcggaaccgtgattccatcaaataacgaaaagaagtccagaggcttcttcaactaccaggctagcatcttcgcggagaatttcggaccgcgcttcactaagggagaaggattcttcagcgttttcgccatcttcttcccagcggcgacggggatccttgccggagcaaacatttccggagatctggaagatccgcaagatgcgattccacgcggaactatgctcgccatcttcatcaccaccgtggcgtacctgggagtggccatttgcgtgggtgcctgcgtggtgcgcgacgccaccggtaatatgaacgataccatcatctcggggatgaattgtaacggctccgccgcctgcgggctggggtacgacttctcccgctgtagacatgaaccgtgccagtacggattgatgaacaactttcaggtgatgtctatggtcagcggattcggcccgctgattaccgcgggcatcttctcagccaccctctcgagcgctctggcctcgttggtgtcagccccgaaggtgtttcaggcgctgtgcaaggacaacatttacaaggccctccaattcttcgcgaagggctacggcaagaacaatgaaccacttcggggttatatcctgaccttcctgatcgcgatggcgttcatcctgatcgcagaactgaatactatcgcccccatcatttcgaacttcttcctggctagctacgcgctgatcaacttttcgtgcttccacgcaagctacgccaagtcgccgggttggaggccggcctatggcatctacaatatgtgggtgtcgctcttcggagcggtgctttgttgcgcggtgatgttcgtgatcaactggtgggccgctgttatcacctacgtcattgagtttttcctgtatgtctacgtcacttgtaagaaaccggacgtgaattggggatcgagcactcaagccctcagctacgtgtcagcgctcgataatgcgttggagctgacgaccgtcgaggaccatgtgaaaaactttcgccctcagtgtatcgtgctcaccggcggtcccatgacgcggcccgccctgctggatatcactcacgccttcaccaagaattccgggctgtgcatctgttgcgaggtgttcgtgggtccgcggaaactgtgcgtgaaggagatgaattcaggaatggcaaaaaagcaagcgtggttgatcaagaacaaaatcaaggccttctacgctgcggtcgccgctgattgcttcagagacggggtcagatcgctgttgcaagcctcaggactgggacgcatgaaacctaacaccctcgtcattggctacaagaaaaactggcgcaaggccccgctcaccgaaattgaaaactacgtcggcatcatacatgatgcatttgacttcgaaatcggagtggtgatcgtgcggatcagccaggggttcgacatctcgcaagtgctgcaggtgcaagaagaactggaacgcctggagcaggaaagactcgccctggaagcaactattaaggataacgagtgcgaagaggaaagcggaggtatcaggggactcttcaagaaggcgggaaagctcaacatcaccaagacgactccaaagaaggacggctcaatcaacacgtcacagtccatgcatgtgggagagttcaatcagaagttggtggaggcgtcaactcagtttaagaagaaacaggaaaaaggcactatcgacgtctggtggctgttcgacgacggaggccttactctgctcatcccgtacatccttactctccgcaagaagtggaaggactgtaagctgcgcatctacgttggaggcaaaatcaaccgcatcgaagaagagaagattgtgatggcctcactcctgtcaaaattccggattaagtttgccgatatccacatcattggagacatcaatattcgccctaataaggagtcgtggaaagtgttcgaggaaatgatcgaaccataccggctccacgagagctgtaaggacctcactactgccgaaaagctgaagcgcgaaaccccatggaagatcactgacgctgagctggaagcggtgaaggaaaagtcataccgtcaggtgaggctgaacgaattgctccaagagcacagcagagccgccaacctgatcgtgctgtcgctcccagtggccagaaagggaagcatctcggacctgctgtacatggcatggctggagattctgactaagaacctgccgccggtcctgcttgtccgggggaatcataagaacgtgttgactttttactca

SEQ ID NO: 251135 - DNA, 3297 bp, synthetic construct
  misc_feature 1..3297: note = Description of Artificial Sequence: Synthetic coding sequence
  source 1..3297: mol_type = other DNA
atgtccctcaacaattccagtaatgtattcctggacagcgtgccatccaacacaaaccgctttcaagtatccgtgatcaacgagaaccacgagtcctcagctgccgctgacgacaatacagatccgcctcactacgaggagacaagtttcggggatgaagcccagaagcgcttgcgcatttccttcaggcccgggaatcaagaatgctacgacaacttcctgcagtctggcgagactgctaagacagacgctagcttccatgcttatgactctcacacaaacacttactacctgcagacattcggtcacaacaccatggatgcggtgcctaagattgagtattacagaaataccggatctatttctgggccaaaggtgaataggccttcccttctcgaaatccacgagcaactggcaaagaacgtggctgtgaccccaagttccgctgaccgagtggccaatggagatggcatccctggcgatgagcaggctgaaaataaggaggacgaccaggcaggcgtagtgaagtttggctgggtgaaaggggtcctggtgagatgcatgctgaatatctggggggtgatgctgttcatccggctctcctggattgttggggaagcaggaattggtctcggcgtcattatcatcggactttctgttgtagtgacgaccctgaccggcatctctatgtcagccatttgcactaatggcgtggtccgcggcggaggcgcatactatctcatttcccggagcctcggccccgagtttgggggtagtatcggtctcatcttcgccttcgcaaacgcggtggccgtcgcaatgtacgtcgttggtttcgccgagaccgtggtggatctgcttaaagagtcagactctatgatggtggatcccaccaacgatattcggattattggaagcatcactgtggtgattctgctgggaatttctgtcgctggaatggaatgggaggcgaaggctcaagtcatcttgctggtaattttgttgatagcaatcgccaatttttttatcggcacggtgattccatccaataacgagaagaagagtcgggggttctttaattaccaggccagcatttttgcggaaaactttgggcctcggttcaccaagggagaaggattttttagcgtgtttgccatctttttccccgcagctaccgggattctggctggggcaaatattagcggggatcttgaggaccctcaagacgccatcccgcggggcacaatgcttgctatcttcatcaccaccgtggcctacctgggcgtggctatttgtgtaggcgcctgcgtggtgagagatgcaaccgggaatatgaacgatacgatcatttcaggtatgaactgcaacggctccgctgcctgtggcctggggtatgatttttcaagatgtcgacatgagccatgccagtatggactgatgaacaacttccaggtcatgagcatggtgtcaggattcggtcccctgatcaccgctggtatattctccgccaccttgtcctcagccctcgcgagccttgtcagtgcccctaaagtattccaggcactgtgtaaggataatatatataaagcgctgcagttttttgccaagggctacggaaagaacaacgagcctctgagagggtatattctgacatttctcattgcaatggccttcattctcattgccgagctgaatacaatagctcctatcatatccaacttctttctggcgagttacgccctgatcaatttcagctgtttccacgcctcatacgccaagtcccctggctggaggccagcctacggcatctacaacatgtgggtaagcctgttcggcgctgtgctgtgctgcgctgtgatgttcgtgatcaattggtgggccgcagtgattacatacgtcatcgagttttttttgtacgtctacgtgacctgtaaaaagccagacgtgaactggggtagctccacacaagctctgagttatgtgtccgctctcgacaatgccctcgagttgaccaccgttgaggaccatgtcaagaattttcggccccaatgtattgtgctcaccggcggacccatgactaggcctgcgttgcttgacatcacccacgctttcactaagaatagtggtctgtgcatctgttgtgaagtatttgtgggtccacggaaactgtgtgtgaaggagatgaattccggcatggcaaagaaacaggcctggctgattaagaataaaataaaggcattttatgctgctgtggcagccgattgctttcgggacggcgtgcgatccctcctgcaggctagcgggctgggcaggatgaaacccaataccctggtgattgggtataagaagaattggcgaaaagctcccctcactgagattgaaaattacgtgggaatcattcacgacgccttcgatttcgagattggagttgttatagtccgaatctcacagggctttgacatcagtcaggtccttcaggttcaggaggagctcgagcggctcgaacaggagaggttggccttggaagctaccattaaagacaatgagtgtgaagaggagtcaggcggtatccgaggccttttcaaaaaggcagggaaactgaacatcactaaaaccactccaaagaaagacggaagcattaacacatcacagagtatgcacgtaggcgaatttaatcagaagctggtggaagcctctacgcagttcaagaagaaacaggagaaagggaccatcgacgtgtggtggctctttgacgacgggggtcttacattgctgattccatacatcctgaccctgagaaaaaaatggaaggactgcaagctgagaatctacgtgggcggcaaaataaaccggattgaagaggaaaagatcgtaatggccagcttgctctccaagtttcgaataaaattcgcagacatacacatcattggagacatcaacattcgaccgaacaaggagagctggaaggtgtttgaagagatgatcgagccttatagactgcatgagtcatgcaaggacctgacgactgccgaaaagctgaagcgcgaaacaccatggaagatcactgatgcagagctggaggccgttaaagagaagtcttatcgacaagttaggctcaatgaattgttgcaggaacatagccgggcggccaatctgatcgtcctttccctgccagtggccaggaaggggtccatctcagacctgctctatatggcatggctggaaatcctcacaaagaatctgccccctgtgctgttggtgaggggaaaccataagaatgttctgactttttattca

SEQ ID NO: 251136 - DNA, 3297 bp, synthetic construct
  misc_feature 1..3297: note = Description of Artificial Sequence: Synthetic coding sequence
  source 1..3297: mol_type = other DNA
atgtctctaaataacagctccaatgtgtttttggacagcgtcccttccaatactaaccggttccaagtctccgtgattaacgagaatcacgaatcttccgctgctgctgatgataacaccgacccacctcactatgaagagaccagcttcggcgatgaagcacagaagagactgcgaattagttttcggccaggaaaccaagaatgctacgataacttcctgcagtccggggagaccgcaaaaacggacgcttcattccatgcatatgacagccataccaacacgtactacctccaaacctttggccacaacaccatggacgccgtcccaaaaatagaatattaccggaacacaggaagtatcagcggaccgaaagtgaatcgaccctcccttctggagatccatgaacagttggcgaagaacgtagccgtgactccatcctctgccgaccgcgtagctaacggcgatgggattccaggagacgaacaagccgaaaacaaagaggacgatcaagccggagtggttaaatttgggtgggtcaaaggtgtccttgtgcgctgcatgctaaacatatggggcgtaatgctgttcatacgcctgagttggatcgttggagaggcgggaataggactcggcgtgataatcatcggactatctgttgttgttactacccttactgggatctcaatgtccgccatatgtactaacggggtggtgaggggcggaggcgcctactatttaatcagtaggtctctcggcccagagttcggcggaagcatcggattgatcttcgcattcgccaacgcagtcgccgttgctatgtacgtggtgggattcgctgagacggtcgtggacctactgaaagaatccgatagtatgatggtggaccctactaatgacattcgaataatagggagcataacagttgtgattctcctgggcattagtgtggcggggatggaatgggaagccaaggcccaggttatcctcttagtgatccttctcattgctattgctaatttcttcatcggaacggtcatcccatccaataatgaaaagaagagccgcgggtttttcaactatcaggcttctatttttgcagaaaattttggtcccagattcactaaaggtgagggttttttttccgtgtttgctatcttctttccagcagcaaccggtattctcgctggggcaaacatttcaggcgacctggaggatcctcaggacgccattccgaggggcactatgctggcgatatttatcacaacagtggcctatctaggtgttgcaatatgcgtcggagcctgcgtggtgcgtgacgccacagggaatatgaacgatacgattatttccgggatgaactgtaatgggtccgctgcgtgcggtctgggttacgacttttcccggtgtaggcacgagccatgccagtatggactcatgaataatttccaagtgatgagcatggtcagcgggttcggccccctgataaccgccgggattttttcagccaccctgagcagtgctcttgcttccctcgtgtctgctcctaaagtcttccaggccttatgtaaagataatatttacaaggcccttcaatttttcgcaaaaggatatggtaaaaacaacgaaccgttgcggggctatatcctcacgttcctgatcgctatggcatttatactgatcgccgagttaaatacaatagctcccatcatttcaaatttctttctcgcctcttacgcacttattaacttctcttgtttccacgcctcatatgcaaagagtcctgggtggagaccagcatacggtatttacaacatgtgggtgagtctgttcggagcggtgctgtgctgcgccgtgatgttcgtgatcaactggtgggcagccgtaattacctatgtgattgagttctttctttacgtttacgtgacctgcaaaaagccagatgtcaactggggaagcagtacacaggccctttcctacgtaagcgctttggacaacgcccttgagcttaccaccgtggaggatcatgttaaaaattttcggccacagtgtattgtactgactggggggccaatgacaaggcctgcgctgctggatatcacacacgcctttactaaaaacagcgggctctgtatttgctgtgaggtctttgtaggacctagaaagctctgtgtgaaagaaatgaacagtggaatggctaagaaacaggcctggcttataaagaacaagattaaagctttttacgccgccgtggccgctgattgttttcgggatggggtcagatcattgttgcaggcatcaggcctcgggcgcatgaagccaaacacactggtcatcggatataagaaaaactggcggaaagcaccactcacagagatagagaactacgttggaattatccacgatgcatttgatttcgagatcggggtagtgatcgttaggatctctcagggattcgatatttcgcaggtactccaagtgcaagaggaactcgaaaggctcgagcaggaacgactcgctctggaagccaccatcaaagataacgagtgtgaagaagaatcaggtggcattaggggtctgtttaagaaagcaggcaagctgaacatcaccaagaccactccaaagaaggatgggagtatcaacacctcacagtccatgcacgtgggagaatttaaccagaaattggtggaagcctctacacaatttaagaaaaagcaagagaaaggtacgatcgatgtctggtggctgttcgatgacggcgggctgacactgctgattccatacatcctgactcttcggaaaaagtggaaagattgtaagctgaggatttacgtaggagggaagattaacagaattgaggaggaaaaaatcgtcatggccagccttttatctaagttccggatcaaatttgcggatatccacattatcggcgacattaatattcgccccaacaaagaaagttggaaggttttcgaagagatgatcgagccttatcggctccatgaaagttgcaaagacttgacgactgcagagaaactcaaaagggagacgccctggaaaatcactgatgcggagcttgaggccgtcaaggaaaagagctaccggcaggttcgattaaacgagctgctgcaggaacattcgagggcagcaaacttgatcgtcttgtctttgcccgtcgcccggaagggttccatctcagacctcttgtatatggcgtggctcgagatactgaccaaaaacctgccacccgttctgcttgtcagggggaaccacaagaacgtattaacattttactca

SEQ ID NO: 251137 - DNA, 3297 bp, synthetic construct
  misc_feature 1..3297: note = Description of Artificial Sequence: Synthetic coding sequence
  source 1..3297: mol_type = other DNA
atgtccctgaataactcctcgaatgtgttcttagattcggtgccctctaatacgaaccgattccaagtgtcggtgatcaacgaaaatcatgaaagcagcgcggcagcagatgacaacaccgaccccccccattacgaagagaccagtttcggagatgaggctcaaaagcgcttgcggatctcatttagaccaggtaaccaggagtgttacgataatttcctgcaatctggggagacggctaagaccgacgccagtttccacgcatacgattcgcatacgaacacatattacctccaaaccttcggccacaacacgatggacgccgtgccgaagattgagtattaccgaaataccggctcaatctccggaccaaaggttaacaggccctctctactggagatccacgagcagctggccaagaatgtggctgtgacgccctccagcgctgaccgcgtcgctaatggcgatggcatccccggtgatgaacaggcggagaacaaggaggacgatcaagctggagtggtaaagttcggatgggtgaagggcgtcttagttagatgcatgctcaatatctggggtgtcatgctgttcatccggctgtcgtggattgtgggcgaagccggaattggactcggcgttatcattatcgggctgtccgttgtcgtcacgactttgacaggtatctcgatgtcggcaatatgcacaaatggcgttgtgcgtggcggcggagcgtactacctgatatcgaggagtctcggacccgaatttggtggttccataggtctgatctttgcttttgcaaacgccgttgcggtggccatgtatgtggtcggcttcgctgagaccgtggttgacttattgaaggagagcgattcgatgatggtggatcccacgaacgatatacgtatcattggcagtattaccgttgtcatcctgctggggataagtgtggccggcatggagtgggaggccaaggcccaagtcatcctgctggtgattttgctcatagccattgctaacttcttcattgggacggtgatcccgtccaacaatgagaagaaatcacgaggcttttttaattaccaggcctctatcttcgcggagaattttggcccacgcttcaccaagggcgaggggtttttttctgtgtttgccatttttttccccgcggccactggcatcctggctggtgcaaatatctccggagatctggaggatccccaggatgcaatcccgcggggaacaatgctggctatcttcatcaccacagttgcctatctgggcgtcgccatctgcgtcggtgcatgtgtggtaagagatgcaacaggtaacatgaacgacaccattatcagcggcatgaactgcaacggctccgctgcctgcggactgggctacgatttttctcgttgcaggcatgagccgtgccagtacggcttaatgaataatttccaagtgatgtccatggtctcgggcttcggccccctgatcacagccggaatattcagcgccacgctgagttccgccctcgccagcctggtatcggccccaaaagtgttccaggccttgtgtaaggataatatctacaaagctttgcagttcttcgccaaggggtatggtaagaataatgagcctttgcgcggttacatcctgacgttccttattgctatggccttcatactgattgccgaattgaatactatcgctccaatcattagcaacttcttcctcgcgtcctacgcactgatcaacttctcttgcttccacgcctcttatgctaaatccccgggctggcgccctgcgtacggtatatataatatgtgggtttctctgttcggcgcggtactctgttgcgccgtgatgtttgttatcaactggtgggccgccgttattacctacgtgattgagttttttctttacgtgtacgtcacatgtaagaagcccgatgtgaattggggatcgagtacacaggccttgtcctacgtctctgccctggataatgccttggaattgacaactgtcgaagaccacgtgaaaaacttcagaccccagtgtatcgtccttacaggtggaccgatgacccggcccgcactactggatattacccacgctttcaccaagaatagcggcttgtgcatttgctgcgaggtcttcgtgggccctcgcaagctctgcgtgaaggaaatgaattctggcatggcgaagaagcaagcatggttgatcaagaacaagattaaggccttttatgccgcagtggcagctgattgctttcgagatggagtgcgaagccttttgcaggcgtcaggcttgggccgtatgaagcctaataccctagtcataggctacaagaagaattggcgcaaggcacccttgaccgagatcgagaactacgtgggcatcatacatgacgcgttcgatttcgaaataggcgtcgtcattgtaaggataagccagggattcgatatatcccaggtgctgcaggtgcaggaggagctcgagcgcttggaacaggaacgcttggccttggaagctaccattaaggataacgagtgcgaggaggagagcggcggcatccgaggtctgttcaagaaagcgggcaagctgaacataacgaaaactaccccgaagaaggatggatccataaacactagtcagagcatgcatgtgggcgaattcaaccaaaagctggtggaagcgtcgacacaatttaaaaagaagcaggagaaaggaaccatcgatgtctggtggcttttcgacgatggcggccttacactactgatcccatatatcctgacgttgcggaaaaagtggaaggattgcaaactccgaatatacgtcggaggcaagattaataggatcgaggaagagaagatcgtgatggcatccttactgtccaagttccgaataaagttcgccgacattcatatcataggagacataaacatccgaccgaataaggagagctggaaggtgtttgaggaaatgatcgaaccctaccgattgcacgagagctgcaaggatctcaccacagctgagaagctcaagcgggagactccatggaaaatcaccgatgcggagttggaagccgttaaagagaagtcctataggcaagtgcgtctcaatgagctgctgcaggagcacagccgcgccgctaacctgattgtcctcagtttgccggttgcccgtaaaggaagcataagtgatctgttgtatatggcctggctggagatcctgaccaagaatctgccccccgtgctgctagtgaggggaaatcacaagaatgtgttgaccttctactcc

SEQ ID NO: 251138 - DNA, 3297 bp, synthetic construct
  misc_feature 1..3297: note = Description of Artificial Sequence: Synthetic coding sequence
  source 1..3297: mol_type = other DNA
atgtcattaaataactcttccaacgtctttctggatagtgtgccctccaatactaaccgatttcaggtgtcagtgatcaatgaaaaccatgaatcttctgccgctgccgatgacaatactgaccctccccactatgaggaaacatcttttggggacgaggctcagaaaaggttgagaatctcttttcggcctggaaaccaagaatgttacgataacttcctccagtctggagagacagccaaaactgatgcaagttttcatgcctatgattcccatactaacacatattatctgcagacatttgggcataatacaatggatgctgtgcccaagatcgaatattatcgcaacacagggtccatatctgggcctaaagtgaatcgccccagtctcctggaaatacatgaacagctcgctaaaaatgtagcggtaacacccagttccgccgacagagtggccaatggagatgggatccccggagacgaacaggccgagaataaagaagatgatcaggctggggtggttaaatttggatgggtaaagggagtcctggtccggtgcatgctaaatatatggggggttatgctctttattcgactgtcgtggatcgttggagaagctggaatagggttaggggtaataattataggactctccgtggtagtgacaactctcactggaatctctatgagtgctatttgcactaacggagtggtacgagggggaggagcgtattatttaataagtagatccctcgggcccgaattcgggggaagtatcggattaatattcgcttttgcaaatgccgtcgctgtggcaatgtatgtggtcgggttcgctgaaacggtcgttgaccttctcaaagaatccgattctatgatggttgatcctactaacgatataaggattataggatctatcacagtggtgattctgctcggaatttcggtggcagggatggaatgggaagctaaagcacaggtcatcctactggtaatccttctgatcgctatagctaacttctttatcggaacagtgattccatccaacaatgaaaagaaatcacggggattcttcaactatcaggcttcaatctttgcagagaatttcgggcctagatttactaagggagaagggtttttctctgtgttcgccatatttttccctgctgcgactggaatcctagctggagccaatatatctggagaccttgaagatcctcaggacgccatccctcgagggactatgctcgcaatattcataacgactgtggcatacctcggagttgcaatctgtgtaggagcatgcgtggtgagagatgccacaggaaatatgaacgatactataatatcagggatgaactgtaacggaagtgctgcatgtgggctcggatatgatttctccaggtgtcgccacgagccatgccagtatgggctgatgaataattttcaggtgatgagtatggtgtcaggattcgggcctctaatcactgccgggatcttcagtgcaacactctcttctgcattggctagtctggtatcagcccctaaagtgttccaggctctctgtaaagataatatatataaagccttgcagttttttgccaaaggatacggaaagaataacgaaccccttcgggggtacatcctcacatttctaatcgctatggcttttatcctcatagcagaattgaacactatcgccccaatcatatccaatttctttctggcttcttacgcgctcataaacttctcctgcttccacgcctcctatgctaaatcgcccggatggcggcctgcctatgggatttataacatgtgggtgtccctatttggagcagtactttgttgcgctgtgatgtttgtcataaattggtgggccgctgtgatcacatatgtgatcgaatttttcttgtacgtctacgtgacttgcaagaaacctgatgtgaactgggggtcaagtacacaggcactatcttatgtgtcagcactcgataatgcacttgaattaactactgttgaagaccacgtgaaaaattttcgaccccagtgcatagtcctaacaggaggaccaatgactcgacccgcgttattagatatcacacacgcctttacaaaaaactctgggttatgcatttgttgtgaagttttcgtcggaccaaggaaattatgcgtcaaagagatgaactccgggatggcaaaaaaacaggcctggctgataaaaaacaaaataaaagccttttatgcagcggttgccgctgattgtttccgtgatggagtaagatcactcttacaggcttcggggctggggcgtatgaaacccaatactcttgtgatcggatacaaaaaaaactggcggaaggctcccctgacagagatcgagaattatgtaggaattatccacgatgcatttgactttgaaataggagtggtgattgttcgtatatctcaggggtttgatatatctcaggtcctccaggtgcaggaagaactcgaacgcctagaacaagagagactggctctggaagccacaatcaaagacaatgaatgcgaagaagaatcaggagggatcagggggctcttcaaaaaggctgggaagctgaacataacaaagactacaccaaaaaaagatgggtccatcaatacatcgcagtcaatgcacgttggagagttcaaccagaaattggtggaagcttcaactcagtttaaaaaaaaacaggaaaaggggactatcgatgtatggtggttgttcgatgatggaggacttacactgctaataccctatatcctcactctccgcaagaaatggaaggattgtaaactccggatctatgtgggagggaaaataaatcgcatagaagaagaaaagatcgtcatggcctccttactctctaaattccgcatcaaattcgcggatatacatattattggggatatcaacattcgcccaaataaggaatcttggaaggtatttgaagaaatgatagaaccctacaggctgcatgaaagttgtaaagatctaacaactgccgaaaaattaaagagggaaacaccttggaaaatcacagatgcggaattggaagctgtcaaagaaaaatcttacaggcaggtgcgacttaatgagctcctccaggaacattcacgggcagccaatctcatagtactgtctttacctgtagcccggaaagggtccatcagtgacctcctctatatggcatggttagagatactcactaaaaatctgccacctgttctgctggtccgcggaaaccataagaatgtcctcacattctattct

SEQ ID NO: 251139 - DNA, 3297 bp, synthetic construct
  misc_feature 1..3297: note = Description of Artificial Sequence: Synthetic coding sequence
  source 1..3297: mol_type = other DNA
atgtctctgaacaactcatccaacgtgttcctcgattcggtgccctcgaataccaacaggttccaagtcagcgtgattaacgaaaaccatgagagctcagcagcagcggatgacaatactgatccaccccactacgaagaaacctcgttcggagacgaagcccagaaacgcctgagaatcagctttaggcctggaaaccaagaatgctacgacaacttcctgcaatccggagaaacggccaagaccgacgcgagctttcacgcatacgattcccacaccaacacctactacctgcagactttcgggcataacacgatggacgccgtgcctaagatcgaatactacagaaataccgggagcatctcagggccgaaggtgaatagaccctccctgctggaaatccacgagcagttggctaaaaacgtggccgtcacgccgtcatctgccgacagggtcgccaacggagacggtatccctggagacgaacaggccgagaataaggaggacgaccaggccggagtggtgaaattcggctgggtgaagggagtgctggtgcggtgtatgctcaacatctggggagtgatgctctttatccggctctcgtggatcgtgggggaagctggaatcggactgggcgtcatcatcatcggactctcggtggttgtgaccactctgaccggcatttcgatgagcgccatctgtactaacggagtggttcgcggagggggcgcttactacctcatctcgagatccctcggcccagaattcggaggatcgatcggactgatctttgcctttgccaatgccgtggcagtggccatgtacgtcgtggggttcgctgaaactgtggtggacctgctgaaggaaagcgattccatgatggtggacccgactaatgacatcaggatcatcggatcaatcactgtcgtgatcctgctcggcatctcggtcgccggcatggaatgggaggcgaaggcccaagttattctgctggtgatcctcttgattgccatcgcgaacttcttcatcgggactgtgatcccaagcaataacgaaaagaagtcgaggggcttctttaactaccaggcttcaatctttgcggagaacttcggccctcgcttcaccaagggagagggattctttagcgtctttgctatcttcttccccgctgcgactggcatcctcgccggagcgaacattagtggcgatcttgaagatccacaggacgcaataccacgcggcaccatgcttgctatcttcatcaccacggtcgcgtacctgggcgtggccatctgcgtgggagcctgtgtggtgcgggacgcgaccggaaacatgaatgatactataatctcgggtatgaattgtaatgggtccgccgcatgtggactgggatacgatttcagccgctgtcgccacgagccctgccagtacggtctgatgaacaatttccaagtgatgtcgatggtgtcgggcttcggtccgttgatcaccgccggaatcttttcggctaccctttcttccgccctcgcgtcactggtcagcgctccgaaggtctttcaagcactttgcaaggataacatttacaaagccctgcagtttttcgccaagggatacggaaagaataacgaaccactgcggggctatatactgaccttcctgatcgctatggctttcattcttatcgctgaactgaatacgatcgcccctatcatttccaactttttccttgcctcgtacgccctgatcaacttctcatgtttccatgcatcctacgccaaaagcccggggtggcgaccagcttacgggatctacaatatgtgggtcagtctgttcggtgctgtgctgtgttgcgcagtcatgttcgtgatcaattggtgggccgccgtgatcacttacgtgatcgagtttttcctgtacgtgtacgttacttgcaagaagccagacgtgaactggggttcgtcaactcaggccctgagctacgtcagcgctctcgacaatgccctggaactgacgaccgtggaggatcatgtgaagaattttcggcctcagtgcatcgtcctgaccggaggcccgatgacccggcctgcacttctggacattactcatgcgttcactaagaacagcggactgtgtatctgctgcgaagtgttcgtcggcccgagaaagctctgcgtcaaggaaatgaattccggaatggccaaaaagcaggcgtggctgatcaagaacaagatcaaggcattctacgccgcggtggcagcagattgcttccgcgacggtgtcagatcactgctccaggcctcaggactcggaagaatgaagccgaacaccctcgtgatcggctacaagaagaactggcgcaaagccccactcaccgagatagagaactacgtggggatcatccatgatgcattcgacttcgaaatcggtgtggtgatcgtgagaatctctcaaggctttgatatctcccaggtcctgcaagtgcaggaagaactcgaacgcttggagcaagaaagactggctcttgaggccactatcaaagataatgagtgcgaggaggaatcaggaggaatccggggcctcttcaaaaaggcaggaaagctgaatatcaccaagactaccccaaagaaggatggaagcattaacacctcgcagtccatgcatgtgggagaattcaaccaaaaactggtcgaagcctcgacccagttcaagaagaagcaggagaagggaactatcgacgtgtggtggctcttcgacgacggcgggctcactctcctgataccctacatccttaccctgaggaaaaagtggaaggactgtaagctgagaatctacgtgggcggcaaaatcaaccggatcgaagaggagaaaatcgtgatggcatcactgttgtccaagttccggatcaagttcgcggacatccacatcatcggcgatatcaatattcggccgaacaaggaatcgtggaaggtgtttgaagaaatgatcgagccctaccgcctccacgagtcctgcaaggatctgaccactgcagaaaagctgaaacgcgagactccgtggaagatcaccgacgccgaactggaggccgtgaaggaaaaatcctaccgccaggtccgccttaacgaactgctgcaggagcattcgcgcgccgcaaatctcatcgtgctctcgctcccggtggcgcgcaagggatcaatttcggatctgctctacatggcgtggctcgagatcctgaccaagaacctcccgccagtcctgctggtccgcggaaaccacaagaacgtgctgactttctactca

SEQ ID NO: 251140 - DNA, 3297 bp, synthetic construct
  misc_feature 1..3297: note = Description of Artificial Sequence: Synthetic coding sequence
  source 1..3297: mol_type = other DNA
atgtccctgaacaactcgagcaacgtgtttttggactctgtcccctccaatactaatcgctttcaggtgtcggtgataaatgagaatcatgaatcatcagcggccgccgacgataatactgatcctccgcattacgaagagacttcgttcggcgatgaggcccagaaacggctgaggatttcgtttcgcccgggaaatcaggagtgttacgacaacttcctgcagagcggggaaaccgcgaaaaccgatgcatcttttcacgcgtacgactcccacactaacacctactacctccaaacttttggacacaacactatggacgcagtaccgaagatcgaatactatcggaataccggcagcatcagcggccctaaggtgaaccgtccatcgctcttggaaattcatgaacaattggccaagaatgtggcggttacgccttcgtcagccgatcgcgtggctaacggtgacggaatccctggagacgaacaagctgagaataaagaagatgatcaagccggggtggtgaaatttggatgggtgaagggagtgctcgtgaggtgcatgttgaatatctggggagtcatgttgttcattcgcttgtcctggatcgtgggcgaagccggaatcggacttggtgtcatcatcatcggactgtccgtcgtggtgactactctgactggaatttccatgagcgcaatctgtactaacggagtggtgcgcggaggcggagcgtactacctcatctcccgctccctgggaccggaatttggtggatccatcggactgattttcgcgttcgctaacgccgtggcagtggccatgtacgtggtgggattcgccgaaactgtggtggaccttcttaaagagtcggacagcatgatggtcgacccgaccaatgacatcagaatcatcggtagcatcaccgtggtgatcctgctgggaatctcggtggccggcatggagtgggaggccaaggctcaggtgattctcctggtcattctgctgatcgctatcgctaacttctttatcgggaccgtgatcccgagcaacaacgaaaagaaatcacggggctttttcaattaccaggcttcgattttcgcagagaactttggtccgcggttcaccaagggcgagggattcttcagcgtgttcgctatctttttcccggcggcaaccggaatcctggccggagcaaatatctcgggagatctggaagatccgcaggacgccatcccgagaggaaccatgcttgcaatcttcatcactactgtcgcatacctcggagttgccatctgcgtgggagcatgcgtggtccgagacgccacgggaaacatgaatgacactatcatctcagggatgaattgcaacggatcagccgcatgcggactgggatacgatttttcgagatgtcgccacgaaccatgccagtacggactgatgaacaatttccaggtgatgtcgatggtatcaggattcggaccactcatcactgctggaatcttctcagcaactctctcgtcagcactggcctccctggtgtcagccccgaaagtctttcaggcgctgtgcaaggataacatctacaaggctctccagtttttcgcaaagggatacggaaagaacaatgaaccgctccgggggtacatcctgactttcttgatcgccatggcctttattctgatcgctgagctgaatacgattgcacctatcatctccaatttcttcctcgcgtcctacgccctcatcaatttctcctgtttccatgcttcatacgctaagtctccaggatggcggcccgcctatggcatttacaacatgtgggtgtccctgtttggagccgtgctgtgctgtgccgtcatgttcgtcattaactggtgggcggctgtgatcacctacgtcatagaattctttctgtatgtctacgtcacttgcaagaaaccggacgtgaattggggctcatcgacgcaagcgctctcgtacgtcagcgccctggataacgcccttgagctgactaccgtggaagatcatgtcaaaaactttagaccgcagtgcatcgtcctgaccggcgggccgatgacccgcccggcgctgctcgatatcactcacgccttcaccaagaattcgggactctgtatctgctgcgaagtctttgtgggcccgagaaagttgtgtgtgaaggaaatgaattccggaatggccaagaagcaggcctggctcatcaagaataagattaaagcgttctatgcggcggtggcggctgattgtttccgcgatggcgtgcggagcctgctccaagcctccggactgggcaggatgaagcctaacacgttggtgatcggttacaagaaaaactggcggaaggccccgcttactgagatcgagaactacgtgggaattatccatgatgcattcgacttcgaaatcggagtggtgattgtcaggatctctcaaggcttcgatatcagccaggtgcttcaggtccaggaagagctcgagaggctggaacaagaacggctggctttggaagcgactatcaaagataatgaatgtgaggaagagtctggaggaatcagaggtctgtttaagaaggctggaaaactgaatatcaccaaaaccacccctaagaaggatgggtcaatcaacacgtcgcaaagcatgcacgtgggcgaattcaaccagaagctggtggaagcgagcacccaattcaagaaaaagcaagaaaaaggaaccatcgatgtgtggtggctgttcgacgacggtggattgactctcctgatcccgtacatattgaccttgagaaagaaatggaaggactgtaagctcagaatctacgtcggaggaaaaatcaacagaatcgaagaggagaagatcgtgatggccagcctgctgtccaagttccgcatcaagttcgcggatattcatatcatcggggacatcaacattcggccaaacaaggaaagctggaaagtgttcgaggagatgatcgagccatacaggctgcacgaatcgtgtaaggatctgaccaccgccgagaagctcaagcgggaaactccatggaagatcaccgacgcagaactcgaagcagtgaaagagaagtcctacagacaggtgcgcctgaacgaactgctgcaggaacattcccgcgccgcaaacctcatcgtgctgtcgctcccagtggcgaggaagggaagcatcagcgacctcctctatatggcctggttggagattctgaccaagaacctgcccccggtcttgctggtccggggaaatcacaaaaatgtcctgactttttactct

SEQ ID NO: 251141 - DNA, 3297 bp, synthetic construct
  misc_feature 1..3297: note = Description of Artificial Sequence: Synthetic coding sequence
  source 1..3297: mol_type = other DNA
atgagcttgaacaactcaagcaatgtgtttctcgactccgtgcctagcaacactaacaggtttcaggtgagcgttatcaacgagaatcatgaatcttcggccgctgcggatgacaacacagatcctccccattatgaagaaaccagtttcggagatgaggcccagaaacgcctgcgcatctctttccgcccgggaaatcaggaatgttatgacaactttctgcaatctggtgagacggctaaaactgatgcttcctttcacgcctatgattctcacactaatacgtattacttacagacattcggtcacaacacaatggatgccgttcccaagatcgaatattacaggaataccgggagtatctcaggccccaaggtgaaccggccctccctcttggagatccatgagcaactggccaaaaatgtggccgtgacgccttccagtgcagacagagtggctaacggagatggcatccccggcgatgagcaggccgaaaataaagaggacgatcaggcaggcgtggtcaagttcgggtgggtcaagggggtcctggtccgctgcatgctgaacatatggggcgtgatgctgtttatccggctctcttggattgttggcgaagctggcatcggactgggggtcataatcattggtctgtctgtagtggtaaccaccctgacaggcatctccatgtcagcaatctgtaccaatggtgtggttagaggaggcggagcctactacctgatcagtcgatccctaggcccggagtttgggggaagcattgggctgatttttgcctttgccaacgcagtggcagtggccatgtacgttgtgggtttcgccgaaactgtcgtggacctactcaaggagagtgattctatgatggtggatccgaccaacgacattcggatcattggctcaattacagttgtcatccttctcgggatctccgtggcggggatggagtgggaggccaaagcccaggtgattcttcttgtgattctcctgatcgctattgccaatttcttcatcggtaccgtgatcccttctaacaacgagaagaagtcgcgaggtttctttaactaccaggcaagcatctttgccgagaactttgggccacggttcacgaaaggtgaaggtttcttcagtgtcttcgcgatcttctttcctgctgcaactgggatactggccggcgcgaatatttcaggggatctcgaggatcctcaggacgcaatcccaaggggaacaatgctggcaatctttataactaccgtcgcctacttgggcgttgctatctgtgtaggcgcctgcgtcgtccgcgatgcaaccggcaatatgaacgacaccatcatttccggtatgaattgtaatggaagtgcagcctgcggtttgggatacgatttctctaggtgccggcatgaaccatgccaatacggactgatgaataacttccaagtgatgtctatggtcagtggcttcggccctctgataacggctggaatcttcagcgcaacgttgtccagcgctcttgcctcacttgtgtctgcgccaaaggtctttcaggcgctgtgcaaggacaacatttataaagcattacaattcttcgctaaggggtatggtaagaacaacgaaccccttcgcggctatatcctaaccttccttatagcaatggccttcatcctgattgccgagctcaataccatagctccaataattagtaacttttttctggccagctacgccctgataaactttagttgctttcacgcctcctacgcgaagtcccctggatggagaccagcttacgggatctacaacatgtgggtgagcctgttcggcgccgtgctgtgttgtgctgtcatgttcgttattaactggtgggccgctgtgatcacctatgtgatcgaatttttcctgtatgtgtacgttacttgtaagaaacctgacgtcaactgggggagcagtacacaggctctcagctatgtgtccgctctggacaacgccctggagctgactaccgttgaggatcatgtgaagaacttccgcccgcagtgcatagtgctaactggtggcccaatgactagaccggcgctgttggacatcacgcacgctttcacaaaaaacagcgggttgtgcatatgctgcgaggtttttgtcggtccacgtaaactgtgtgtaaaagagatgaattccgggatggctaaaaagcaggcatggctgattaaaaataagatcaaggcattctatgccgccgtggccgctgactgcttccgcgacggggtgcggtcattgttacaggcctcaggtctcggcaggatgaagccgaataccctggtgatcgggtacaaaaagaactggaggaaagctcctttgacagaaatcgagaactatgtcggcatcatccacgacgcgttcgacttcgagatcggggtggtgattgtcaggatcagccagggctttgatatcagccaagtccttcaggtgcaggaagagctggagaggctggaacaggaaagactagcccttgaggccaccatcaaagacaacgagtgtgaggaggagtccggcgggatccgcggactttttaagaaggcagggaaattgaacattactaagacaacccctaagaaggatggaagtatcaacaccagccagtctatgcatgtgggagaatttaatcaaaagctggtcgaggccagcacccagttcaaaaagaagcaggaaaaagggacaattgatgtctggtggctgtttgatgacggtgggctgacactgctgatcccatacatcctgacactaagaaagaagtggaaggattgcaagctgcggatctatgttggtgggaagatcaaccgcatcgaagaggaaaagatcgtcatggcaagtttgctttcgaaattccggattaagtttgcagacatacacatcattggtgacatcaacatcaggccaaataaggagtcttggaaagtctttgaggaaatgattgagccctaccgactgcacgagtcctgtaaggacctgaccacggctgaaaaactgaagcgcgaaaccccctggaagattacggacgcggaacttgaagccgtgaaagaaaaaagctaccggcaggtccgcttaaacgaactgttgcaagaacactctagggcagcaaatctaattgtcctttcactgccagtggccaggaagggttctatcagtgatctgctttatatggcatggctcgaaatactgactaaaaatttgcctcctgtgttgctcgtgcggggtaatcacaagaacgtgctgacgttttatagc

SEQ ID NO: 251142 - DNA, 3297 bp, synthetic construct; identical to SEQ ID NO: 251087
  misc_feature 1..3297: note = Description of Artificial Sequence: Synthetic coding sequence
  source 1..3297: mol_type = other DNA

SEQ ID NO: 251143 - DNA, 3297 bp, synthetic construct
  misc_feature 1..3297: note = Description of Artificial Sequence: Synthetic coding sequence
  source 1..3297: mol_type = other DNA
atgagcttgaataactcatcgaatgtgtttctggactcagtgccgtcaaataccaatcggttccaagtctctgtaatcaatgaaaatcacgaatcaagcgccgccgcagatgacaatactgatccgccacactacgaggagacgtcattcggagatgaggcccaaaagcgcttgcgcatctcgtttagacccggcaaccaggagtgctacgacaacttcctgcaatcgggtgaaaccgctaagacggacgcgtcgttccacgcctacgattcccataccaacacctactatctgcagacttttgggcacaatactatggatgcagtgccgaaaatcgaatactaccgcaatactggatccatcagcggcccaaaggttaaccggccatcgctgctcgagatccatgaacaacttgcgaagaacgtggctgtgaccccgagctcggccgacagagtggctaacggagacggaatccccggtgacgagcaggccgagaacaaagaggacgaccaggctggagttgtcaaattcggatgggtgaagggagtcctggtgagatgcatgctgaacatctggggggtgatgctcttcatccggctgtcgtggatcgtcggagaagccgggatcggcctcggagtgatcatcatcggcttgtcggtggtggtgaccactttgaccggaatctccatgtcagccatctgtactaacggagtggtgcgcgggggcggagcctactacctgatctcgcggtcgctgggacctgaattcggcggaagcattggactgatcttcgcgttcgcgaatgcggtagccgtcgctatgtacgtcgtcggcttcgccgaaaccgtggtggacctgctcaaggagtccgactcaatgatggtggatcctaccaatgacatacgtatcataggatctatcaccgtcgtcattctgctgggaatcagcgtcgctggcatggaatgggaggccaaagcccaagtgatccttctggtgattctccttatcgcgatcgctaatttctttattggcaccgtcatcccaagcaacaatgaaaagaagtcacggggcttcttcaactaccaggcctctattttcgcggagaacttcgggcctcggtttactaaaggagaaggtttcttcagcgtgttcgcaatattctttccagcggctactggaattctggccggtgccaacatttccggcgacctcgaggatccgcaagatgcgatcccaagagggaccatgctggcaatcttcatcaccactgtggcctatctcggcgtggcgatctgcgtgggggcgtgtgtggtcagggacgctaccggaaacatgaacgacactattatctccggaatgaattgtaacggctccgcggcctgcggactcggatacgatttctcacgctgccgccacgaaccttgccaatatggactgatgaacaatttccaggttatgtcgatggtttcgggatttggtcctctgattactgccggaatattctcagcaacgttgtcatccgccctggcttccctggtgtcagcaccaaaggtgtttcaagcgctgtgtaaggacaatatctacaaagcactgcagttttttgccaagggctacggaaaaaacaacgaacccctccggggttacatcctcactttcctgatcgccatggcattcatcctcattgcagaacttaacaccatcgctccaatcatctccaacttctttctcgcatcgtacgcccttatcaacttttcctgcttccacgcctcttatgcgaagagcccaggctggcggccggcttacggaatttacaacatgtgggtgagcctgtttggagccgtcctctgttgcgcggttatgttcgtgatcaactggtgggcagcagtgatcacttacgtgatcgaattctttctgtacgtctacgtgacgtgcaagaaacctgatgtgaattggggaagctctacgcaagctcttagctacgtctcagctctcgataatgctctggaattgacgactgtcgaggatcacgtgaagaatttcagaccgcaatgcattgtgctgactgggggaccaatgacccggccggcactgctggacattactcacgcattcaccaagaactctggactctgcatctgctgcgaagtattcgtcggtcctagaaaactctgcgttaaggagatgaattcaggaatggcgaagaagcaagcgtggctgatcaaaaacaagataaaagccttctacgcggccgtcgcagcggattgcttcagagacggagtgcgctcgctcctccaggcctcgggcctgggacggatgaaaccaaacaccctggtgatcggatacaagaagaactggagaaaggcgccgctcactgagatcgaaaactacgtgggcatcatccacgacgccttcgacttcgaaatcggagtcgtgattgtgcgcatttcgcaaggattcgatatctcgcaggtgttgcaggttcaggaagagttggaaagattggagcaggaacggctggccctcgaggcaaccatcaaagataatgaatgcgaggaagaatccgggggaatacgcggtctgttcaagaaagccggcaaactcaacatcaccaagaccacgccgaagaaggacggatcgatcaatacttcccagagcatgcacgtcggagagtttaaccagaaactggtggaggcctcgactcagttcaagaagaagcaagaaaaggggaccatcgacgtgtggtggctcttcgacgacggcggactgactctgctgatcccgtacatcttgactctgaggaagaaatggaaggactgcaagctgcgcatctacgtgggcggaaagatcaaccgcatcgaagaggagaaaatcgtgatggcttcccttctctcgaaatttcgcatcaaatttgcggacatccacatcatcggagatatcaacatacgacctaacaaggagagctggaaagtgttcgaggaaatgatcgaaccatacaggctgcatgagtcgtgtaaagacttgaccaccgccgaaaaactgaaacgcgaaactccgtggaagatcacggatgccgagctggaggcggtcaaggaaaagtcataccggcaggtcaggctgaatgagctgctccaggaacactcccgcgccgcgaaccttatcgttctttcccttccggtggcacggaagggatcgatctcggatctgctttacatggcctggctggaaatcctgactaagaatcttccgccggtgctcttggtccgcggaaaccataagaacgtgctcaccttctactcc

SEQ ID NO: 251144 - DNA, 3297 bp, synthetic construct
  misc_feature 1..3297: note = Description of Artificial Sequence: Synthetic coding sequence
  source 1..3297: mol_type = other DNA
atgtccttgaataactcgtccaacgttttcctcgattcagtcccatccaatactaatagattccaagtctccgtcatcaatgagaaccacgaaagttcggcggccgctgacgacaacactgacccaccgcactacgaagaaacttcgtttggagacgaggcgcaaaagagactgcggatctcattccggccggggaaccaggagtgctacgataacttccttcagtccggagaaaccgcaaaaactgacgcgagctttcatgcgtacgactcgcataccaatacctactacctgcaaactttcggacataacactatggacgccgtgcctaagatcgagtattatcgaaacacgggaagcattagcgggccgaaagtgaatcgccccagcctgctcgaaatccatgaacagctcgcaaagaacgtcgcagtgaccccttcatccgccgatcgcgtggcgaacggagacggaatcccaggcgacgaacaggcggagaacaaggaagatgaccaagccggcgtggtcaaatttgggtgggtgaaaggagtgctcgtgaggtgcatgctcaacatctggggagtgatgttgtttatccgcctgtcgtggatcgttggcgaagccggaatcggtctgggggtcatcattatcggactgtcggtcgtggtgactaccctgaccggcatttcgatgtccgcgatctgcaccaatggagtggtgcggggaggcggagcttactaccttatctccagatccctcggcccggaattcggcggtagcatcggcctgatcttcgccttcgctaacgccgtcgccgtggcgatgtacgtggtgggattcgccgaaaccgtggtcgacctgcttaaggagtcggatagcatgatggttgacccgaccaatgatatccgcatcatcggaagcattacggtggtgatccttttgggtatcagcgtggcgggtatggagtgggaggctaaggcccaagtcattttgctcgtgatcctgctgatcgctattgctaacttcttcatcgggaccgtcattccgagcaataacgaaaagaagtcacgtggattcttcaactaccaggcttcgatattcgcggaaaactttggccctaggtttactaaaggagaaggattcttctcagtatttgccatcttttttccagccgccactggaatcctggcgggtgccaacatctcgggagatctcgaggacccacaagatgccatccctcgggggaccatgctggctatcttcatcaccaccgtcgcgtacttgggagtcgctatctgcgtgggagcctgcgtggttcgggacgctactggcaacatgaacgacaccataatctcaggcatgaactgcaacggctcggcagcttgcggactgggatatgacttctcaagatgccggcacgaaccctgccaatacgggctgatgaataacttccaggtgatgtcaatggtgtccggcttcggaccgcttatcactgcgggaattttctcggcaactctgtcgtcggccctcgcctccctggtgtcggcccctaaagtgtttcaggcgttgtgcaaggataacatctacaaagcactgcagttcttcgccaaaggatacggtaagaacaatgaaccactgcggggctacatcctcaccttcctcatcgcaatggccttcatcctgatcgctgaattgaacacgatcgcgccgatcatctcaaacttcttcctggcatcctacgctttgatcaatttctcgtgctttcacgcctcctacgcgaagagccccggatggcggccggcgtacggaatatacaacatgtgggtgtcactcttcggggccgtcctctgttgcgcagtgatgtttgtcattaactggtgggcagccgttattacctatgtgatcgaattctttctgtacgtctacgtcacttgcaagaagccagatgtcaactggggtagctccactcaggctctgtcctacgtgagcgcactcgacaatgccttggaacttactaccgtggaggatcacgtaaagaacttcaggccgcaatgtattgtgctgacgggcgggccaatgaccaggccagctctgctcgacatcactcacgccttcaccaagaattcgggattgtgcatatgttgtgaagtttttgtcggcccgcgcaaactttgtgtcaaggaaatgaacagcggaatggccaagaagcaggcgtggctcatcaagaataagatcaaggctttttacgccgctgtcgccgctgactgtttcagagacggggtgagaagcctgttgcaggcgtctgggctcggcaggatgaagccgaacaccctggtgattggctacaagaaaaactggcgcaaggcacctctcaccgagatcgagaactacgtgggcatcatacatgacgcgttcgacttcgaaataggagtggttatcgtgcggatcagccagggcttcgacatttctcaagtgctgcaggttcaggaagaactcgaaagattggagcaggagcgcctggcgctggaggccacgatcaaagacaatgagtgtgaggaagagtccggaggaatccgcggtcttttcaaaaaggcaggaaagctcaatatcactaagactacccccaagaaggacggatcaatcaacacctcgcagtcgatgcacgtcggagagtttaaccagaaactggttgaagccagcacgcaattcaaaaagaagcaagagaaagggactatcgatgtgtggtggctgtttgacgatggtggcctgaccctgcttattccctatatcctcaccttgcgcaaaaagtggaaagattgtaaattgagaatttacgttggaggaaagatcaaccggatcgaggaagagaagatcgtcatggcaagcctcctgtccaagttccgtatcaaatttgcagatatccacattattggagacattaacattcggccgaacaaggagagctggaaggtgttcgaggaaatgattgagccctacaggctgcacgaaagctgcaaggatctgaccaccgcagagaagttgaagcgcgaaacgccttggaagatcaccgatgcggagctggaagctgtcaaagagaagtcataccgccaggtgcgcctgaatgagctcctccaagagcactcccgggccgccaacctgatcgtgctctccctcccggtggctcgtaaaggatcgatctccgatctgctgtacatggcgtggctcgaaattctcactaaaaacttgccgccggtgctgctggtacggggaaaccataagaatgtgctgaccttctactcc

SEQ ID NO: 251145 - DNA, 3297 bp, synthetic construct
  misc_feature 1..3297: note = Description of Artificial Sequence: Synthetic coding sequence
  source 1..3297: mol_type = other DNA
atgtctcttaacaatagtagtaacgtcttccttgactccgtgccgtctaacaccaatcggtttcaagtgtccgttatcaacgagaaccacgaaagtagcgctgccgcagacgacaacaccgatcctccccactacgaggagactagctttggcgacgaggctcagaaacggctacggatttcttttcgtccaggaaatcaggagtgctatgataattttctgcagtccggcgaaaccgctaagaccgacgctagttttcacgcctatgattcccacactaatacttattatctgcagacatttgggcataacacgatggatgccgtcccaaaaattgagtattatcgcaacactggatcaattagcggtcccaaggtaaatcgtcccagtctcctcgaaatccacgagcagctggccaaaaatgtggcggtgacaccaagtagtgccgacagggtggcgaatggggatgggatccctggtgacgaacaggccgagaataaagaggacgaccaggctggggtggtgaagttcggctgggtaaagggggttctggtgagatgcatgctgaacatctggggagtcatgctcttcattcggctgtcatggattgttggcgaagcaggcatcgggctgggtgtgattatcattggattgtctgtggtcgtgaccactctgacaggcatctccatgtcagcaatctgcaccaatggggtggtaaggggagggggtgcctattacctgatcagcagatccctaggacctgagtttggtggttctattggcctgatcttcgcttttgccaatgctgtcgcagtagcgatgtatgtggtgggtttcgctgaaacagtggtggatttactcaaagagagcgactctatgatggtagaccccaccaatgacataaggatcatcggctctataaccgtggtgattctgcttggcatcagcgtcgctggcatggagtgggaggctaaggcccaggtgattctgctggtgatcctcttgattgcaatagccaattttttcattggaactgtgattccttccaacaatgagaaaaagtctcgaggctttttcaattaccaggccagcattttcgccgagaatttcgggcccagatttaccaagggcgagggattcttcagtgtatttgctattttcttcccggctgccacgggcattctggccggcgccaatatttcaggtgatctagaggatccccaggacgctataccgcgggggaccatgctcgccattttcattaccacagttgcctacctgggcgtggcgatctgtgtgggcgcgtgcgtagtgcgagatgccaccgggaacatgaacgataccatcatctcaggcatgaactgtaacggctctgcggcctgcggtctggggtatgattttagtagatgcaggcacgagccatgtcagtacggactgatgaacaatttccaggtgatgtctatggtgagtggcttcggccccttgataactgcgggaatattcagtgcaacactatcttccgcactggctagcctggtcagcgccccgaaagtgttccaggccctttgtaaagacaatatctacaaggcattgcagttcttcgctaagggatatggaaaaaataatgagcccctccgtggttatatcctcacattcctgatcgccatggcattcattttgatcgccgagctgaacactatcgccccaataatctcaaactttttccttgcaagctacgccttaatcaatttttcctgtttccacgcttcctatgctaaaagtccagggtggagacccgcctatggtatctacaatatgtgggtctctctcttcggagccgtgctgtgttgtgcagtaatgttcgtcatcaattggtgggccgctgtcatcacctatgtaattgagttcttcctgtatgtgtacgtcacatgtaagaaacccgacgtaaattggggcagctccacacaggccctaagctatgtcagcgccctggacaacgctcttgagctgaccaccgttgaagatcacgtgaaaaatttcaggccacaatgcatcgtgctgaccgggggacctatgacccggccggcccttctggatattacacacgcatttaccaagaactctgggttatgcatatgctgcgaggttttcgtggggcctcgcaaactttgtgtgaaggagatgaacagcggcatggccaagaagcaggcctggttaatcaaaaataagataaaagccttttatgcagccgtggctgcagactgctttagagatggtgttaggagcttattgcaggccagcgggctgggtcggatgaagccaaacaccctggttattggttataagaagaactggaggaaggcgcctcttactgaaatagaaaactatgttggaattattcatgatgctttcgacttcgagattggagtggtaatcgttagaatcagtcaaggatttgacatttctcaagtgctgcaggtgcaggaggaattggaacggctggaacaggagcgcctggccttggaggctacgattaaggacaacgagtgcgaagaagagagtggcggtattcgggggctctttaagaaggcagggaaactgaatatcaccaagaccacacccaaaaaagatggctctataaatacttcacagtccatgcacgtgggagaattcaaccagaaattggttgaggcctccacccagttcaaaaaaaagcaggaaaagggcactatagacgtgtggtggctgtttgatgacggtgggctcactttactgattccctacatcttgactttaaggaagaaatggaaggactgcaaactgaggatatatgtcggcggtaagatcaaccgcattgaggaggagaagatcgtgatggcatccctgttgtccaaattccgcattaaatttgcagatatccatataatcggcgatattaatattcggcctaataaggaatcttggaaagtcttcgaggaaatgatcgagccttatcgacttcacgaatcgtgcaaggatctgaccactgccgagaaactgaagagagagacaccctggaaaattacagatgccgagctggaagctgtcaaggagaagtcttatagacaggtgcgtctgaacgaactcttgcaggaacatagccgtgccgccaacttgatagtactgtctctgcctgtagcccgcaagggctctatctcagatctgttatacatggcctggctggagatactcactaaaaatcttccccctgtattgcttgtgcgcggaaatcacaaaaacgtgctcactttctactca

SEQ ID NO: 251146 - DNA, 3297 bp, synthetic construct
  misc_feature 1..3297: note = Description of Artificial Sequence: Synthetic coding sequence
  source 1..3297: mol_type = other DNA
atgtcactgaataacagctctaatgtgttcctggacagtgtgccctcaaacacaaaccggttccaggtatctgtgatcaacgagaatcatgaaagttccgcggccgccgacgacaacaccgaccctccccattatgaggagacaagtttcggtgatgaagcccaaaaacggcttagaatctcgttccgtccaggaaaccaggaatgttatgacaattttctccagtccggagaaacggccaaaaccgacgcaagtttccacgcctatgactcccacaccaatacttactaccttcagacctttggccataacacaatggacgcggtcccaaagatagaatattatcgtaacaccggatccatctccggtccaaaggtgaatcggccttcacttctcgagatacacgagcagctcgctaaaaatgtggccgttacgccctccagcgccgatcgagtggcaaacggtgacgggatcccaggggatgagcaggctgaaaacaaagaagatgaccaggcaggggtggttaagttcgggtgggtcaagggagtgctcgttcgctgtatgctgaatatctggggggtcatgctctttatccgcctgagctggatagtgggagaagcgggtataggtcttggggtgatcattatcggtctgtctgtcgtggttactactcttacaggtatttctatgtctgccatttgtactaacggcgtggtgagaggcggcggggcatattacctgatttccagaagtctggggcctgagttcgggggatccatcggccttatcttcgcgtttgccaacgcggtggctgttgccatgtacgtcgttggatttgccgaaacagtcgttgatttgctgaaggaaagcgactccatgatggtggaccccacgaacgatattcgtataatagggtcaatcacggtggttattctgcttggaatttctgtcgctggcatggagtgggaggccaaagctcaggttatcctgctcgtgatactgttgatcgccattgccaacttttttatcgggacagtgatcccctctaacaatgaaaaaaagagtcgggggttcttcaactatcaagccagcatctttgccgagaacttcggaccaaggttcaccaaaggtgagggcttcttttccgtcttcgccatcttttttcctgccgccacaggaattctcgctggcgcgaacatcagtggagacttggaggatccgcaggacgctatccctaggggtacaatgcttgccatattcattacaaccgtcgcctacctgggcgttgcgatctgcgtaggggcatgcgtggtgcgagatgccactggtaatatgaacgacaccattatttccggcatgaattgcaacggaagtgcagcgtgtggtttggggtacgatttcagcagatgtagacatgagccctgccagtatggtcttatgaacaatttccaagtgatgtccatggttagcggattcggcccactgattaccgccggaattttcagcgccacgttatcgtcagctctcgctagcttggtctctgcccccaaagtctttcaagccctatgtaaagacaacatctacaaggctcttcagtttttcgcgaagggatacggcaaaaacaatgagccgctgagagggtatatactcacttttctaatcgccatggcgttcatcttgattgctgagttaaatacgatcgcgccgataatcagcaactttttcctggcctcatatgccctcataaattttagctgctttcatgctagctacgcaaagagtcccggttggcgccctgcctacggcatctataatatgtgggtgtccctgtttggggccgttctctgctgcgcagtgatgtttgttattaactggtgggctgcggtgatcacgtatgtcatcgagttttttctgtacgtctatgtgacctgcaagaaacccgatgtgaactggggctcgtccacgcaggcgctgtcgtacgtgtctgccctagacaatgctcttgaattgactactgttgaggaccatgtgaaaaactttagaccacagtgcattgtcctgactgggggcccgatgactcgccccgctctgctggatattactcacgcattcaccaagaattccgggctctgcatttgttgcgaggtttttgttggtcccagaaaactgtgtgtgaaagaaatgaactcagggatggccaagaagcaagcctggttgataaaaaataaaattaaggctttctacgccgccgtcgccgctgattgcttcagggatggcgtccgtagtcttctgcaggcgtccggccttggccggatgaagcctaacaccttagtcatcggctataagaaaaattggaggaaagcccccctgacagagatagaaaactacgtgggaatcattcacgacgcttttgacttcgagattggagttgtaattgtccgcattagccagggtttcgacatctcgcaggtactgcaggtgcaggaagagcttgagcgtctggaacaggagaggctcgccctagaggctaccattaaagacaacgagtgcgaagaggagtcgggaggcattcgcggcctgttcaaaaaagcaggcaagttgaacattacgaaaaccacccctaaaaaagacggctctataaacaccagtcagagcatgcatgtcggtgagttcaatcagaagctggttgaggccagcacacagtttaaaaagaaacaggagaagggaaccatcgatgtatggtggctgtttgacgacggagggctgacattactcattccctacatcttgactctcagaaaaaaatggaaggactgtaaacttaggatttacgtcggaggtaagatcaaccgcatagaggaggagaaaattgtgatggcttctctgctctctaagtttcgcattaaattcgctgatattcacattatcggtgatattaacattagacccaataaggagtcctggaaagtgtttgaagagatgatagagccctaccgtctgcacgagagttgcaaagatctaacaactgccgagaagctgaaacgcgagacaccatggaagattaccgacgctgaattggaggccgttaaagagaaaagttatcgtcaagtacgcctaaacgaactcttacaggagcacagccgggctgctaatttgatcgtgttgtctttaccggtggcgcgtaagggatcaatttccgacctgttgtatatggcgtggctcgagatcctcaccaagaaccttccccctgttctgttggtgaggggtaaccacaagaatgttctcacattctatagc

SEQ ID NO: 251147 - DNA, 3297 bp, synthetic construct
  misc_feature 1..3297: note = Description of Artificial Sequence: Synthetic coding sequence
  source 1..3297: mol_type = other DNA
atgagtcttaataactccagtaatgtatttcttgattctgtaccatcaaacacaaaccgattccaggtttctgtaatcaatgaaaaccacgaatctagtgctgcagctgatgataacactgatccccctcactacgaagaaacatcctttggagacgaagctcagaaaagactccgcatttcttttaggcctggaaatcaggagtgctacgacaacttcctgcagtcgggagagacagccaaaacagatgcttcctttcatgcttatgattcacatactaatacatattatctccagacattcggacataacacaatggacgctgtgcctaaaattgaatattataggaacactgggtctatctccggacctaaagtaaacagaccctctctcctagaaatacacgaacagctagccaaaaacgttgcggtcactccatcctctgccgatcgcgtggccaatggagatggaatacccggagatgaacaggctgaaaacaaagaagatgaccaggcaggggtcgtaaaattcgggtgggtcaagggagttctggtaagatgtatgctaaacatctggggagtgatgctgtttatacggctatcctggatcgtaggagaagccggaatcgggctcggagtaattatcattggactgtcggttgtggtgactactcttactggaatctccatgtctgccatatgtacaaacggggtggttcggggagggggggcctattatcttatctctcgctccttggggcccgaattcggagggtctatcggactgatcttcgcttttgctaacgccgttgctgtggctatgtacgtcgttggattcgctgaaacagtcgtcgatctgctcaaggaaagtgattcaatgatggtggatcccacaaacgatatcaggattattgggtctataacagtggtgatacttttagggatctcagtggccggaatggagtgggaagctaaggctcaggtaattcttcttgttatactcctaatagcgatcgccaatttcttcattgggactgtgataccttcgaataatgaaaaaaaatcgaggggatttttcaattaccaggcctcaatctttgctgaaaatttcgggcccaggtttactaaaggggaaggatttttttcagtcttcgctatattttttcctgccgccacagggatcttagccggagctaatatctccggagacctcgaagatccccaggatgcaatacctagggggacaatgctcgccatcttcataactacagtggcttatttaggagtagctatatgcgtaggggcttgtgtcgtgagggatgcaactggaaacatgaatgatacaatcatctccgggatgaactgcaacgggagtgctgcatgtggactggggtatgatttttctcggtgtagacacgaaccttgtcagtatgggttaatgaacaacttccaggtcatgtcaatggtgagtgggttcgggcctctgataactgccgggatattctcggccacactgtcctccgctctcgctagtcttgtgtctgcccctaaagtctttcaggccttgtgtaaagataacatctacaaagcactacagttcttcgcgaaagggtatgggaaaaacaacgaaccacttaggggatacatccttacattcctcatagccatggcttttatactcattgccgagctgaatactatcgcacctattatttctaacttctttttagcgagttatgccctcattaacttcagttgtttccacgccagttatgccaagtcccctggatggcgccccgcttatgggatatataacatgtgggtatctctatttggggctgtgctgtgctgtgcagttatgtttgttattaattggtgggccgctgtgatcacttatgtcatcgagttcttcctgtatgtgtatgttacatgcaaaaaacctgatgttaactggggatcctcaactcaggccctctcttatgtgtctgctctggataacgcattagaactcactacagtggaggaccacgtgaaaaattttaggccccagtgtatagtgcttactggaggacccatgactcggcccgcactactcgatatcacacatgcatttacaaaaaattccggattgtgcatatgctgtgaagtgttcgttggacctaggaaactctgtgtgaaagaaatgaattcaggaatggccaagaaacaggcctggctaataaaaaataaaattaaagccttttacgcagcagtagccgcagactgcttccgcgatggggtccgttctctgctccaggcttcggggctggggcgtatgaaacctaacactttagtgatcggatataagaaaaattggcgcaaagccccactcacagaaatcgaaaactatgttggaataattcatgatgcattcgactttgaaatcggggtagtgatagtacgaatcagtcaggggttcgatataagtcaggtgttacaggtgcaggaagagcttgaacgccttgaacaggaacggctggctttggaagcaacaattaaagacaacgagtgcgaagaagaatctggaggaatccgggggctttttaaaaaggccgggaaactaaatattactaaaactactccgaaaaaagatggatctataaacacttcacagtccatgcacgtcggagagtttaatcagaaactcgttgaagcatcgacacagttcaaaaaaaaacaagagaaaggaacaatcgacgtttggtggctctttgatgatggaggactgactctattgattccttatattctcacgctaagaaaaaaatggaaggattgtaaactgaggatctatgtgggggggaaaatcaataggatcgaagaagagaaaatcgttatggccagtctactatctaaatttcggataaaatttgcagatatacacattataggggatattaatataagaccaaataaagaatcatggaaagttttcgaggaaatgattgaaccttatcgactccatgaatcttgcaaagacctgacaactgctgaaaagctcaaaagggaaacaccatggaaaatcacagatgccgaactggaagctgtgaaagaaaaatcctatagacaagtgaggctgaatgaattgcttcaggagcactcccgcgccgcaaatttaatagttctttcacttcctgtggccaggaaaggatctatcagtgacctgctctatatggcctggctggaaatactcacaaaaaacctccctcccgttttgcttgtgcgagggaatcacaaaaatgtgctgacattctatagt

SEQ ID NO: 251148 - DNA, 3297 bp, synthetic construct
  misc_feature 1..3297: note = Description of Artificial Sequence: Synthetic coding sequence
  source 1..3297: mol_type = other DNA
atgtcgctcaacaattcatcgaacgtctttcttgattccgtcccatcgaatacgaatagattccaggtgtcggtaatcaacgagaatcatgaaagctccgcagcagcggacgataacaccgatcctccgcactacgaagagacgtcattcggagacgaggcgcaaaagaggcttagaatctcatttcgccctggcaatcaggagtgttacgataacttcctgcagtccggagaaactgccaagaccgatgcctctttccacgcctacgacagccatactaatacttactaccttcaaaccttcggacataacaccatggatgcagtgcctaagattgagtactaccgaaacacggggagcatctcaggccctaaggtgaaccgaccatcgcttctggaaatacacgagcagttggccaagaacgtggcagtcaccccctcgagcgccgacagagtggctaacggggacggtattcctggcgatgaacaagcagaaaacaaagaggacgaccaagcgggagtggtgaagtttgggtgggtgaagggtgtgctggtgcggtgtatgctgaatatctggggtgtgatgctctttattcggctctcctggatcgtgggagaagcagggatcggactcggagtcatcattattggtctttcagtggtggtcaccacccttaccggtatctcaatgtcagccatttgtactaacggtgtggtcagaggtggaggagcgtactacttgatttcgagaagcctcggacccgaatttggtggaagcattgggttgatcttcgcatttgctaacgcggtggcggtggcaatgtacgtggtgggatttgcggagactgtggtggatctgctgaaggagtcggactccatgatggtggatcctaccaatgatattagaatcatcggttcgattactgtggtcattcttcttggaatcagcgtggccggtatggagtgggaagccaaggcacaagtcatcttgctcgttattctccttatcgcaattgcaaatttctttatcggaacggtgatcccttccaataacgaaaagaagtcacgcgggttcttcaattatcaggcttccatctttgcagagaatttcggacctcgatttaccaaaggggaaggttttttctctgtgtttgcgattttctttccagcagcaaccggcattctcgccggtgcaaacatttcaggagatcttgaagatccgcaagatgccatacccagaggcaccatgctggcaattttcattactaccgtggcataccttggcgtggcaatctgtgttggagcgtgcgttgtgagagacgccaccggtaacatgaacgacactatcatttcgggcatgaactgcaatggttcagcagcatgtggactcgggtatgatttttcaagatgtaggcacgagccttgtcaatacggcctgatgaataactttcaggtgatgtcaatggtgtccggctttggacccctcatcaccgcagggattttctcggccaccctgtcctctgcactcgcgagcctcgtcagcgctccgaaggttttccaggctctttgcaaggataacatctacaaggctctgcaattcttcgcaaagggatatggcaagaataatgagccccttaggggctacatcctgacttttcttatcgccatggcatttatccttattgccgagcttaataccattgcgccgataatctccaatttctttctcgcatcctatgcattgatcaacttcagctgtttccacgcttcctacgctaagagccccgggtggcggcccgcgtacggcatttacaacatgtgggtcagcctctttggagccgtgctgtgttgtgcagtgatgtttgtgattaactggtgggcggcagtcattacttacgtgattgaattcttcctttacgtgtacgtcacctgtaagaagcctgacgtgaattggggctcctcaacccaagcactgagctacgtctcggcacttgacaatgcccttgaattgaccacggtcgaagatcacgtgaagaactttcgcccacaatgtatcgtgctcaccggaggtccaatgactcggcctgcacttctggacattacgcacgcatttactaagaattcaggtctttgcatatgttgcgaagtgtttgtgggtccaagaaagctgtgcgtgaaggagatgaactcgggaatggccaaaaaacaggcgtggcttatcaagaataagatcaaggcattttacgcagcagtggcagcagattgtttccgggatggggtgcgctcgctgctgcaagcaagcggactcggacgcatgaagcctaatactctcgtcattggttataagaagaattggagaaaggcgcccctgactgagattgaaaactacgtcggaataatccatgatgcattcgactttgagatcggtgtggtgatagtgcggatatcccaaggatttgacatcagccaagtgctgcaggtgcaagaggagctggaacggctggaacaggagcgattggcactggaagcaaccatcaaagataatgaatgtgaggaagaatccggtggtattcgcggtttgtttaagaaggctggaaagctgaacatcaccaagaccacccccaaaaaagatggatcgataaacacctcccaaagcatgcacgtcggcgagtttaatcagaagctggtggaagcaagcacgcaattcaagaagaagcaggaaaagggcactatcgacgtgtggtggctgtttgatgacgggggcctgacgctgctgattccatacatactgaccctccggaaaaagtggaaagattgtaagctgcgaatttacgtcggaggaaagattaaccgcattgaggaagaaaagatagtgatggcaagcctgttgagcaaattccgcatcaagtttgctgatattcacatcattggagacattaacattagacccaataaagaaagctggaaggtgtttgaggaaatgatcgaaccgtaccgcctccacgaatcgtgtaaagatctgaccactgctgaaaaacttaagcgcgaaaccccatggaagattactgatgcagagctggaggccgtgaaggaaaagagttaccgacaagtgagacttaacgaactgctccaggaacactcgagagcggcaaaccttatagttctttcgctgccggtggcgcgtaagggatcaatcagcgatctcctttacatggcatggctcgagattcttacgaagaaccttcctcccgtgcttctcgtccgtggaaaccataagaatgtccttacgttttactct

SEQ ID NO: 251149 - DNA, 3297 bp, synthetic construct
  misc_feature 1..3297: note = Description of Artificial Sequence: Synthetic coding sequence
  source 1..3297: mol_type = other DNA
atgtctctgaataactcaagtaatgtgtttttggactccgtcccgtccaataccaaccgctttcaggtgtccgtcatcaacgaaaaccacgaaagctccgcagcagccgacgataataccgatccgccccattacgaagaaacctcctttggagatgaagctcagaagcgacttaggatttcctttaggccaggtaaccaggaatgctacgataacttcctgcagtcgggggaaaccgcaaagaccgacgcatcattccatgcgtacgacagccataccaacacttactacctgcagacttttggacataacactatggatgcagtgccaaagatcgagtactaccgcaataccggaagcatcagcgggcccaaggtgaatcgtccttcgctgctcgaaatccacgagcaacttgcaaagaacgtcgcagtgactccatcatcggccgacagagtggcaaatggagatggaatcccaggagatgagcaagcagaaaacaaagaggacgatcaagccggagtcgtgaagttcggttgggtgaagggagtccttgtgcggtgtatgctgaacatttggggggtcatgctgttcattaggctttcgtggatagtgggcgaagccggaattggcctcggagtgatcatcattggactgtcagtggtcgtgaccacccttaccggaatcagcatgagcgcaatatgtaccaacggtgtggtgaggggaggcggagcatactacctcatttcgaggtcacttgggccagagtttggtggctccattggacttatcttcgcctttgccaacgccgtggccgtcgcaatgtacgtcgtgggttttgcggagactgtcgtggaccttctcaaggagtccgacagcatgatggtggatccaactaatgacataagaatcatcggttcgataacggtggtgatccttcttggtatttcggtggcaggcatggaatgggaggcaaaggcccaggtgattctgcttgtcatactccttatcgcaatcgcaaacttctttattggcactgtgatccctagcaacaatgaaaagaagtcaagaggattctttaactaccaagcaagcatctttgccgagaattttggtccacggttcactaaaggggagggattcttctcagtctttgccattttctttcctgctgcaacgggtattcttgccggagccaacatttcaggcgatttggaggatccccaagacgcaattccacggggaaccatgcttgcaatcttcattaccaccgtggcataccttggtgtggccatttgcgtcggagcatgcgtggtgcgagatgcaactggtaatatgaatgacactattatctccgggatgaattgcaacggatcggctgcatgtggactgggctacgattttagcagatgccgacacgagccttgtcagtacgggctcatgaacaacttccaagtgatgtcgatggtgagcggtttcggacctcttattaccgcgggaattttctccgcaactctttcctcggcactggcctcccttgtgtcggctcccaaggtgtttcaggcgctttgtaaggacaacatctacaaggcgctgcagtttttcgcgaaaggttatggcaagaacaatgagcccctgaggggatacatcctcacttttcttattgcaatggcatttatccttattgcagaactgaacactattgcgccaattatctctaactttttcctcgcatcctacgccctgataaacttttcctgttttcatgcctcgtacgcaaaatcacctggctggcggccggcatacggcatatacaacatgtgggtcagcctttttggagccgtgctttgttgcgcagtcatgttcgtgattaactggtgggccgcagtgataacgtacgtgattgaattcttcctgtacgtgtacgtgacctgtaagaagccagacgtgaattggggtagctctactcaggccctttcatacgtgtcagcactggataatgctctcgaacttactaccgtcgaagatcatgtgaagaatttccggccgcagtgcattgtgctgaccgggggacccatgaccagaccagcgctgcttgatattacgcatgcatttactaagaattcgggtctgtgcatttgctgtgaagtgtttgtgggaccacgcaaactgtgcgttaaggaaatgaattcggggatggccaaaaaacaagcatggctgataaagaacaagatcaaagcattttacgcagcagtggcagcagactgctttagagatggagtgagaagccttcttcaagcatcgggcctggggagaatgaagcctaataccctggtgattggatataagaagaattggcgaaaagcacccctcaccgaaattgaaaactacgttggcattattcacgacgcgtttgattttgagattggtgtggtgatcgtgagaatctcgcagggctttgacatctcgcaggtgttgcaggtccaagaagagcttgaacgtctggagcaagagagacttgcactggaggccactattaaggacaatgagtgtgaagaggaatcgggtgggattcgcggtttgtttaagaaggcagggaaactgaacattaccaaaaccacccccaagaaggatggcagcattaacacgagccagtcgatgcacgtgggcgaattcaaccagaagctcgtggaagcatcaacccagtttaagaagaagcaagaaaaggggactatcgatgtgtggtggctttttgatgatggagggcttacgctgttgatcccatatatccttactctgcggaagaagtggaaggattgcaagctcagaatatacgttggtggcaaaatcaatagaatagaggaagagaagatcgtgatggcaagtctgctgtcaaagtttcgaatcaagttcgcagatatccatatcattggagacattaacatccggcctaacaaagaatcgtggaaagtgtttgaagagatgattgaaccatacagacttcacgagtcgtgtaaggacctcaccaccgccgaaaaacttaagagggagactccttggaaaatcactgacgctgaactcgaagctgtgaaggagaaatcataccgacaggtgcgacttaatgagcttctccaggaacacagcagagccgcaaatctgattgtcttgagcctcccagtggccagaaagggtagcataagcgatcttctctatatggcttggctggagattctcaccaagaatttgcctccagtgctgttggtgcgtggtaaccacaaaaacgtgctcactttctactca

SEQ ID NO: 251150 - DNA, 3297 bp, synthetic construct
  misc_feature 1..3297: note = Description of Artificial Sequence: Synthetic coding sequence
  source 1..3297: mol_type = other DNA
atgtccctgaacaactcaagcaacgttttcctcgactctgtacccagcaatactaaccgctttcaggtgagcgtgatcaacgagaaccacgaaagcagcgcagctgccgatgataatacggaccccccccattacgaggagacttcttttggcgacgaggcccagaagcggctgagaatctcctttcggccaggcaatcaggagtgttacgacaacttccttcagtcaggcgagacagcaaagaccgacgcatcctttcacgcctacgactcacacacgaacacgtactacctgcaaacattcggacataacacgatggatgccgtcccgaaaattgaatactatcggaatacagggtctataagtggcccaaaggtgaatcgaccttctctgctggaaatccacgaacagcttgctaagaacgtcgccgtaacccctagttcagcagatcgggtggccaatggcgatggtatcccaggtgacgaacaggctgagaataaagaggacgaccaagctggggtcgtcaaattcggctgggttaagggtgtgctggtgaggtgtatgctgaatatatggggtgttatgctgttcatacggctcagctggattgtgggcgaagccggcataggactgggggttatcatcataggcctgagcgtagtggtgacaactctgacagggatcagcatgagtgctatttgcaccaacggtgtggtccggggtggtggcgcatactacctgattagccggagtttggggccggagtttgggggctctattggtctgattttcgcctttgccaacgccgtggccgtcgcaatgtatgtagtaggcttcgcggaaactgttgtggacctgttgaaagagtctgacagtatgatggtggatcccacaaatgatatacgcattatcggctctatcaccgtggtgattctgctcggaatttcagtggcagggatggagtgggaagcgaaggcacaggtgatcctcctggtgatcctgctgatcgctatagcgaactttttcatcggcaccgtgatcccttccaacaacgaaaaaaagagcagaggttttttcaattatcaggcaagtatttttgccgagaattttggacctagattcactaagggggagggattctttagtgtgtttgcgatcttttttccggccgccaccggaatactggcgggagcaaacatctctggagatttggaggatccacaagatgccattccaaggggtaccatgcttgccatttttatcaccacagtcgcatacctgggggtggccatttgcgtgggagcttgtgtcgtgcgcgatgccacgggaaatatgaacgacaccattatatcaggaatgaactgtaatgggtctgccgcatgcggcttggggtatgactttagcaggtgtcggcatgaaccctgccagtatgggctgatgaacaactttcaggtgatgtccatggtgtccggatttggacctctgatcaccgccggcatatttagcgcaacactgtcatcagctctcgcttcacttgtgtcagctccaaaggtttttcaggccctgtgcaaggacaatatttacaaggccttgcaattcttcgctaagggatacggaaagaacaacgaacccctgagggggtatatcctgacattcctcattgcaatggcctttattctcatcgcagaacttaataccatcgcacctataatttcaaacttcttcttggcaagctacgccctgatcaacttttcatgcttccatgcttcatatgccaagagccccggctggagacccgcgtatgggatctataacatgtgggtttcacttttcggtgcagtactctgctgcgccgtaatgttcgtgatcaactggtgggccgctgtgattacctatgtcattgagttttttctgtacgtatacgtgacttgcaagaaacccgatgtgaactggggcagcagcactcaggctctgagctacgtgtcagcactggacaatgcattggagcttaccaccgtggaggaccacgttaagaacttcaggccacagtgcatcgtgttgaccgggggtccaatgacgcgccccgctctgctggatataactcatgctttcaccaagaattccggcctgtgcatctgctgcgaagtcttcgtaggcccccggaagctctgcgtgaaggaaatgaattccggaatggcaaagaaacaggcctggctcattaaaaacaagattaaggctttctatgcggccgtcgcggctgattgttttcgagatggcgtccgcagcctccttcaggcaagtggactgggccgcatgaagcctaacacccttgtgattggctacaagaagaactggaggaaggccccattgaccgaaattgagaattatgtggggattattcacgacgcatttgattttgaaattggcgtggtgattgtcagaatctctcaggggtttgacatcagtcaggtgctgcaggtgcaagaagaactggaaagactggaacaggagaggttggccctggaagccacgatcaaggacaatgagtgcgaagaggagtcaggaggcatccggggactgttcaaaaaggccggtaagctcaatatcactaaaaccacacctaagaaggatgggagtattaatacctcccagtctatgcatgtcggagagttcaatcagaagctggtggaggcatcaacacaattcaaaaaaaaacaggagaagggcaccatcgacgtttggtggttgtttgatgatgggggcctgacattgctcatcccgtacattctgacattgcggaaaaagtggaaggattgtaaattgcggatttacgtgggaggcaaaattaaccggatcgaggaggaaaagatcgtcatggcctctctgctgtccaagtttcgaattaagtttgcggatattcacatcatcggggatataaatatccgccctaataaagagagttggaaggtgttcgaggaaatgattgagccataccggcttcacgagtcctgcaaagatcttactacagccgagaagctgaagcgagagacgccgtggaagatcacagatgccgaactcgaagccgtcaaagaaaaatcataccggcaggttagacttaatgaacttctgcaagaacacagtagggcggccaatctgatcgtgctctctcttcccgtcgccaggaaaggaagcatatccgatctgctttatatggcgtggctggaaatactgacaaagaatctgccacccgtgttgttggtccggggcaatcacaagaacgtgctgaccttttattca

SEQ ID NO: 251151 - DNA, 3297 bp, synthetic construct
  misc_feature 1..3297: note = Description of Artificial Sequence: Synthetic coding sequence
  source 1..3297: mol_type = other DNA
atgagcctcaataactcgtccaacgtgttccttgattcagtgccaagcaatactaaccgatttcaagtcagcgtcatcaacgagaaccatgaatcatcggcagccgcagatgataatacggatccgcctcattatgaggagacttcctttggcgatgaagcacagaaaaggcttcgcatttcgttccgccccggaaaccaagaatgctacgacaactttctgcagtctggcgaaactgcaaaaactgatgcctcatttcatgcatacgactcacacaccaacacctattacctccaaacctttggacacaacactatggatgcagttcctaagattgagtactacagaaacaccggatccatttccggacctaaagtgaacagacccagccttctggaaattcatgaacaacttgcaaagaacgtggcagtgactccctcgtccgcagaccgggtggcaaacggcgacggtatcccgggagatgaacaagctgaaaacaaagaagatgaccaagcaggtgtggtcaaatttggatgggtgaaaggcgtcctggtgcgatgtatgcttaacatctggggagtgatgttgttcataagattgtcgtggatagtgggtgaggcaggtatcggattgggtgtgatcattattggtctttcggtggtggtgactaccctgactgggatttccatgtcagccatttgcaccaatggagtggtgaggggcggtggagcctactacctgatttcaaggtcgctcggtccagaatttggtggatccattggactcatttttgccttcgctaacgcagtggcggtggcaatgtacgtcgtgggctttgctgagacggtggtggatctccttaaggaatcagattcgatgatggtcgacccaactaatgatattagaatcatcggttccatcactgtcgtcatactgctgggcattagcgtcgcaggtatggaatgggaggctaaagcccaagtgatactgctggtgattctgctgattgccattgcaaacttctttataggcaccgtgattccttccaataacgaaaagaagtcgagaggcttcttcaattaccaggcatcaattttcgcagagaattttggaccacgcttcactaagggagaagggtttttcagcgtctttgcaatcttttttcctgcagcaaccgggatccttgccggagcaaatatctctggagatctggaagatccgcaagacgccattccccgcggaacgatgttggcgatcttcataactactgtggcataccttggtgtggcaatttgtgtcggtgcctgtgtggttcgtgatgcaactggaaacatgaatgataccatcatatccggcatgaattgcaacggtagcgcggcctgcggtctgggctacgatttttccagatgtcggcatgaaccctgccagtacggacttatgaacaatttccaagttatgtcaatggtttccggttttggaccactgatcaccgcaggcatattctcagcaactctcagctccgctcttgcttccctcgtgtccgctcccaaggtgtttcaagccctttgtaaggacaacatttacaaggcactgcagtttttcgccaaggggtacggcaagaacaacgaaccactcagaggctacattcttacgtttcttatcgcgatggcgtttatcctgattgccgagcttaacaccatcgcacccatcataagcaacttttttctggcatcgtacgcactgatcaatttcagctgtttccatgcatcatacgcaaaatccccgggttggaggcctgcctacgggatctacaacatgtgggtgagcctgtttggcgcggttctgtgttgcgctgtgatgttcgtcattaactggtgggcggctgtcatcacttatgtcatcgaattcttcctgtacgtgtacgttacttgcaagaagcctgacgtcaactggggctcgtcgactcaggcactcagctacgtgtcagccctcgacaatgcgctggagctgaccaccgtggaagatcatgtcaagaatttccgccctcagtgtattgtcctgaccggaggaccaatgacccggccagcacttcttgatataactcatgcgttcaccaagaacagcggactttgcatttgctgtgaggtgtttgtggggccacgcaagctgtgtgtgaaggagatgaactccggaatggctaagaagcaggcctggctgatcaagaataagatcaaagcattttacgcggcagtggcagccgattgttttagagatggagtgagatctttgcttcaggcatcgggactcggacggatgaaacctaacacccttgttatcgggtataagaagaattggcgaaaagccccacttactgaaatcgagaactatgtgggaatcattcatgatgcgtttgacttcgaaattggagtggtcatcgtgcgcatctcacaaggtttcgacatttcgcaagtgctgcaagtccaagaagaactcgaacggttggaacaagaaagacttgcactggaagcaacgatcaaggacaatgagtgtgaggaggagtcaggtggcattcggggactctttaagaaggccggaaaactcaacataactaagacgacccccaaaaaagacggttccattaacacctcacaatccatgcatgttggtgaattcaatcagaagttggtcgaagcatcaactcagtttaagaagaaacaggagaaaggtactatagatgtctggtggctgttcgacgatgggggtcttacgctgcttattccgtacattctcacccttagaaagaaatggaaggattgtaaacttagaatctacgtcggaggaaagattaacaggattgaggaagagaagatagtgatggcatcactgttgtcaaagtttagaattaagttcgccgatatacatatcattggagacattaacatacgacccaataaggagtcgtggaaggtgttcgaggaaatgatagaaccctataggcttcatgaatcgtgcaaagatcttaccactgctgaaaagctcaagagagaaactccttggaagatcaccgatgcggagctcgaagctgtcaaggaaaagtcgtaccgccaagtccggctcaacgaattgctgcaggagcattcacgggcagctaaccttatcgtgttgagcctgcctgtggcaaggaagggcagcatatcggacctgctgtacatggcttggctggaaattctgaccaaaaatcttcctccagtgcttcttgtgcgaggaaatcataagaatgtcctcactttttactcg

SEQ ID NO: 251152 - DNA, 3297 bp, synthetic construct
  misc_feature 1..3297: note = Description of Artificial Sequence: Synthetic coding sequence
  source 1..3297: mol_type = other DNA
atgagcttgaacaattcctcgaacgtattcttggactcggtcccatccaataccaacagattccaagtgtcagttatcaacgagaaccatgaatcctcagcagcggccgatgacaataccgatccgccacactacgaggaaacctcattcggcgatgaagcgcagaaacggctccgcatctcattccgaccgggcaatcaggagtgttacgacaatttcttgcaaagcggagaaacggccaagactgacgccagctttcacgcttacgactcacatactaatacttactacctgcaaaccttcggacacaacaccatggacgcagtgcctaagatcgagtactatcgcaatactgggtcaatctctggtccgaaggtcaatcggccttcgctcctggaaatccacgaacaactcgcaaagaacgtggccgtcaccccatcgtcagccgaccgggtggcaaacggcgatgggattccaggggatgagcaggctgaaaacaaggaggacgatcaggctggggtcgtgaagttcggctgggtcaaaggagttctggttcgctgcatgctcaacatctggggggtgatgcttttcatcagactgtcctggatcgtgggagaggccggaatcggactgggagtgattatcataggactttccgtggtcgtgactaccctgaccggaatatccatgtccgctatctgtacgaacggcgtggtgcgagggggaggggcctattacctgatttccagaagcctgggaccggaattcggcggatccatcggcctcatctttgcattcgctaacgcggtcgctgtggctatgtacgtcgttggatttgccgaaaccgtggtcgacctcctgaaggaatccgattcgatgatggtggaccccaccaatgatatccgcatcattggatctatcacggtcgtcattctcctgggcatctcagtagcgggcatggagtgggaggctaaagcacaagtgatcctgctcgtaatcctcctgatcgctatcgccaactttttcatcggcactgtcattccctcgaacaacgagaagaagagcaggggcttcttcaattatcaggcctcaatctttgctgagaatttcggaccgcgcttcaccaagggagagggtttcttctcggtgtttgctatcttctttccggcggccactggcatcctcgcgggcgccaacatcagtggagacttggaggacccacaggacgccattcctaggggaactatgctggcaatcttcattaccactgtcgcatacctgggggtcgcgatctgcgtgggagcatgtgtggttagagacgctaccggaaacatgaatgataccatcatttctggtatgaactgcaatggttcagcggcatgtggtttgggctacgattttagcaggtgccggcatgaaccttgtcagtacgggctgatgaacaacttccaggtcatgtcgatggtcagcggatttggtccgctcatcactgccggtatcttctcggctacgctgagctccgcgctggctagcctcgtcagcgcaccaaaagtgttccaggcactgtgcaaggataacatatacaaggcccttcaattcttcgcgaaaggatacgggaaaaacaatgaaccccttcgtggatacatcctgacctttctgatagccatggccttcatcctgatcgccgagctgaacactattgcgcctatcatctccaacttttttctcgcctcgtacgccctgatcaacttctcatgcttccacgcgtcttacgccaaatcgcctggatggcggccggcctacggaatctacaatatgtgggtgagcctcttcggcgctgtcctttgctgcgctgtgatgtttgtgatcaattggtgggctgcggtcattacttacgtcatcgagttctttctgtacgtgtacgtgacctgcaagaagccggatgtgaattggggatcttcgactcaggctctttcctacgtgagtgcactcgataacgccctcgaacttaccactgtggaggaccacgtgaaaaacttccggccgcagtgcatcgtgctgaccggaggcccaatgaccagacccgcattgctggacatcacccatgcattcactaaaaactccggtctgtgcatttgctgcgaggtgttcgtgggaccgcgcaaactctgcgtcaaggaaatgaattcaggaatggccaagaaacaagcctggctgattaagaataagattaaggctttttacgcggccgtggccgcagactgcttcagggatggagtgagatccctgctccaggcgtcggggctggggcgcatgaagccgaacacgctcgtgatcgggtacaaaaagaactggaggaaggcccctctcaccgaaattgagaactacgtaggaatcattcatgatgctttcgacttcgaaatcggagtcgtgatcgtccggatttcgcaaggatttgacatctcgcaagtgctccaggtgcaggaggagctggaacgcttggagcaagaacggctggcgttggaggcaaccatcaaggacaacgagtgtgaagaagaatcaggaggcatccgcggactgttcaagaaggcaggcaagttgaacattactaaaactaccccgaagaaagacggtagcatcaacacttcccaatccatgcatgtcggagagtttaatcagaagctggtggaagcctctacccagttcaagaagaagcaggaaaaaggaactatcgatgtgtggtggctctttgatgacggcggtctgaccctgctgatcccgtacatcctcactctcagaaagaagtggaaggattgcaaattgcgcatctacgtgggaggtaagatcaaccggatcgaagaggagaaaatagtgatggcgtccctcctctcgaagttccgcatcaaattcgcagacatccacatcatcggcgacatcaatatccgaccgaacaaggagtcgtggaaggtattcgaagaaatgattgaaccgtaccgcctgcacgagtcatgcaaagacttgactaccgccgaaaaactgaagcgggagactccatggaagatcaccgacgccgaactggaagcagtgaaggaaaagtcgtatcgccaagtgcggctgaacgaactcctgcaggaacactcgcgcgccgccaaccttatcgtgctgtccttgcctgtggccaggaagggaagcattagcgacctgctgtacatggcctggctggaaatccttactaagaacctgcccccagtgctgctggtgcggggaaatcacaaaaacgtgctgaccttctacagc

SEQ ID NO: 251153 - DNA, 3297 bp, synthetic construct
  misc_feature 1..3297: note = Description of Artificial Sequence: Synthetic coding sequence
  source 1..3297: mol_type = other DNA
atgagcctgaataactccagcaatgtttttctagatagcgtgccttccaacaccaaccgatttcaggtgtccgttattaatgaaaatcatgagtcctcagccgctgccgacgataataccgaccccccccactatgaagagacgagcttcggggacgaagcgcagaaaagactgcgtatctcttttcggcccggcaaccaggagtgctacgacaatttcctgcagtccggtgagaccgcaaaaaccgacgcatcatttcatgcgtatgattctcacacaaacacctactatcttcagacttttgggcacaataccatggacgcggtgccaaagattgagtattatcgtaacactgggtccatatctggccccaaagtgaacaggccctcactactcgaaattcatgaacagctggccaagaatgtggctgtgactcctagtagtgcggacagagtggccaatggagatggaattcccggcgacgagcaggcagaaaataaagaagatgaccaggccggagtagtgaagttcggatgggtgaaaggcgttctggttaggtgtatgcttaacatctggggggtcatgctcttcatccgcctgagctggattgtcggggaggcaggtatcggcttgggcgtgattataataggccttagcgtcgtggttacaacccttaccggaatatctatgtctgccatctgtaccaacggcgtggtccggggaggcggcgcgtactatctgatttctaggtctctaggtccagagtttggcggctctattggcctcatatttgcctttgcgaacgccgtggctgtggccatgtatgtggtggggttcgccgagacggtggtagatctcctgaaggagtctgactctatgatggtcgatccgactaatgatatccgaatcatcggttcaatcacggtggttattttgctagggattagcgtagcaggaatggaatgggaggcaaaagctcaggttatcctcctggtgattttattgattgccattgctaacttcttcatcgggaccgtgatcccctccaacaatgagaaaaaatctagagggttcttcaattatcaggccagtatattcgcggagaactttggtcctcgattcactaagggcgagggattctttagcgtctttgcaattttttttcccgccgcaaccggcatcctggcgggagccaacataagcggcgacctggaagatcctcaggacgctattcctcggggaacgatgctggctatttttatcactactgtcgcttatctcggcgtggccatctgcgtgggcgcctgcgtcgttcgggatgccaccggaaacatgaacgatacaatcatatccgggatgaactgcaacggctcagcggcatgcggactagggtacgactttagccggtgcaggcacgagccatgccagtacgggcttatgaataacttccaggtgatgtcaatggtctccggcttcgggccactcattacagccggaattttcagcgccacactctcctctgcccttgccagtctggtctcagccccaaaggtctttcaagccctttgtaaggacaacatttacaaggccctgcaattctttgccaaagggtatggaaagaataacgagcccttgcgaggatatattctcacctttctgatagccatggcattcattttgattgctgagttgaacacaattgccccaatcatttctaactttttcctggccagctacgcactgatcaacttctcttgctttcatgcctcctacgcaaagtcccctgggtggagacccgcgtatggcatatacaacatgtgggtgtctttgtttggcgccgtactgtgctgcgccgtgatgttcgtgatcaattggtgggctgccgtaataacctacgttatagagtttttcctgtatgtatatgtcacatgtaagaaacctgatgtgaattggggttcatcgacccaggccctatcttacgtctccgcgctggataatgccctcgaactgaccaccgtggaggatcacgtcaagaacttccgcccccagtgtatcgtcttgacaggcggacctatgactaggcctgcccttctcgatataactcacgcattcaccaaaaattcagggctctgcatctgttgtgaggtcttcgttggaccgaggaagctgtgtgtgaaggagatgaactctggaatggctaagaaacaggcttggctcattaagaacaaaattaaggcgttttatgcagctgtagcagctgactgttttcgagatggcgtgaggtctctgcttcaggctagtggcttgggcaggatgaaaccgaacaccctagtgattggttataaaaaaaattggcgtaaagctccactgacagaaatagagaattacgtggggatcattcatgatgcatttgatttcgaaataggagttgtaattgtgagaatctcacagggctttgatatttctcaggtgctacaggtccaggaagaactggagcgcctagaacaggagcggcttgccctggaggctacgattaaagacaacgagtgcgaggaagagagtggtgggattcgcgggctgttcaaaaaggccggtaaactgaacatcaccaagaccactccaaagaaggacggatctataaacacgagtcagtcaatgcacgttggagagtttaatcaaaaactagtggaagcgtcaacccagtttaaaaaaaaacaggaaaaaggcacgatcgatgtatggtggctatttgatgatggtggcctcactttgctgattccgtacattcttaccctgcgaaaaaaatggaaggactgtaagttaagaatctacgtgggcggtaagatcaatcggatagaggaagagaaaatcgttatggcctcccttctgagcaagttccgcatcaagttcgccgacattcacattatcggagatatcaacattcgtcccaacaaagagtcatggaaggtattcgaggagatgattgagccatatcgactgcatgagagctgcaaggatctgactacagccgaaaaactgaaacgtgagacaccttggaagattacggacgcagaattagaagctgtgaaggagaaaagttaccgccaggtacgtttgaatgaactgctccaggagcattcaagggccgctaacctgatcgtcctgtctctgcctgtggctcgtaaagggtctatttctgacttactttatatggcttggctcgagattctgacaaagaatctgccccctgttctgttagtgcgggggaaccataaaaacgtgttaaccttctactct

SEQ ID NO: 251154 - DNA, 3297 bp, synthetic construct
  misc_feature 1..3297: note = Description of Artificial Sequence: Synthetic coding sequence
  source 1..3297: mol_type = other DNA
atgtccctcaataactcatcgaacgtctttttggattcagtgccttcgaacaccaacaggttccaggtgtcggtgattaacgagaaccacgaatcgagcgctgcagcagatgacaatacggatcctccacattacgaggaaacctcgttcggggatgaagcccaaaagagactgagaatctcgttccgacccggaaaccaggaatgttatgataactttctgcaatcaggggagactgcgaaaaccgacgcctcctttcacgcatacgatagccatactaacacttactaccttcagactttcggacataacaccatggacgcagtgcctaagatagaatactatagaaatactggatcaatttcaggaccaaaggtgaaccggcccagcctgctggaaattcatgagcagttggcaaagaacgtggcggtgaccccatcctcggccgatcgggtggcaaacggtgatggcattcccggggacgaacaggcagagaataaggaggacgaccaggcaggtgtcgtcaaatttgggtgggtgaagggcgtgctggttaggtgtatgctcaatatctggggggtgatgcttttcatccggctgagctggattgtcggagaagcgggaatcggacttggtgtgatcattattggcctctcggtggtggtgactacgttgactgggatatcgatgtccgccatctgtaccaatggtgtcgtgcgcggaggaggtgcatactacctgatttcccgctccctgggtccagaatttgggggatcaatcggactcattttcgcttttgcaaacgcagttgcagtggcgatgtacgtcgtgggttttgcggagactgtggtggacctgctgaaagagagcgattcgatgatggtggatccaaccaatgatataaggattattggatcgataaccgtggttatccttctcggaatatctgtggcaggtatggagtgggaggcaaaggcacaagtgattctcctggtcatcctgcttattgcgatagcaaatttctttattgggaccgtgattccttcgaataacgagaagaagtcgcgcgggttctttaactatcaagcatcgatttttgcagagaactttggacctcgatttaccaaaggggagggatttttctcggtctttgcgatattcttccccgccgcaacggggattctggcaggtgccaatatcagcggagatctggaagatcctcaagatgcgataccccgaggaactatgctggcgattttcattaccactgtcgcgtacctgggagtggccatctgtgtgggtgcgtgtgtggtgagggacgccactggcaacatgaatgacaccattatctccggaatgaactgcaacggatcggcagcctgtggccttggatatgatttcagccggtgtcgacatgagccttgtcagtacggtctgatgaacaactttcaggtcatgagcatggtgtcagggtttggccctctcattaccgcagggattttcagcgcaactctttcgtccgcactggcatcgcttgtgtccgcacctaaggtgttccaggctctgtgcaaagacaacatttacaaggcccttcagttttttgcgaaaggttacgggaagaacaatgaaccccttagggggtacattcttacctttttgatagcaatggcattcattttgattgcagaactgaacaccatcgctcctataatctcaaactttttcctcgcgagctacgctctgatcaatttctcgtgtttccacgcctcttatgcaaaatcgcctggttggcggccggcatacgggatatacaacatgtgggtgtccctgtttggcgcagtgctctgttgcgcggtgatgtttgtgatcaactggtgggcagccgtcattacttacgtgatcgaattctttctctacgtgtacgtcacttgcaagaaacctgacgtgaactggggatcaagcactcaagctctgagctacgtgtccgcgctcgacaacgcgctggaactgacgaccgtggaagatcatgtcaagaacttccgccctcaatgtatcgtgctgaccggcggaccaatgaccagacctgcacttctcgacatcacccatgcctttaccaagaattcaggtctgtgtatctgctgcgaggtctttgtcggtcctcgaaagctctgtgtcaaggaaatgaactccggaatggcgaaaaagcaggcctggctgatcaagaacaagatcaaggcattttacgcagcagtggccgcagattgttttagagacggcgtccgctccctcctccaagcctccggtctgggtcgcatgaaacccaacactctggtgattggttacaaaaagaactggcgtaaggcaccactgaccgaaatcgaaaactacgtgggcattattcatgatgcgtttgactttgagatcggcgtggtcatcgtccggatcagccagggttttgatatttcacaagtgcttcaagttcaagaggaacttgagaggctggagcaggaaagattggcactcgaggcgacgattaaagataatgagtgcgaggaagaatcaggaggaattagagggctgttcaagaaagcaggaaaactcaacataactaagaccactccgaaaaaagacggttccattaacacctcgcagtcaatgcatgtgggagaattcaatcagaagttggtggaagcatccacccagttcaagaagaagcaggagaaaggaaccattgacgtgtggtggttgtttgacgatgggggacttactcttcttattccatacattcttacgcttagaaaaaagtggaaggactgtaagctgcggatctacgtgggtggcaagattaatcgaatcgaagaggaaaagatcgtcatggcctcgcttctgagtaagtttcgaatcaaattcgcggacatccacataatcggggacattaacattagacctaacaaagagagctggaaggtgtttgaagagatgattgaaccttaccgcctgcatgaatcatgcaaggaccttacgacggccgaaaaactgaaaagggagactccgtggaagataaccgatgccgaactcgaggctgtgaaggaaaagagctacaggcaggttcgactcaacgaacttctccaggagcactcgcgcgccgcgaatctgatcgtcctcagccttccagtcgcgcggaaaggctccatttcagatttgctgtacatggcatggctggagattcttactaagaatcttcctcccgtgttgcttgtgcggggaaaccataagaatgtgctgaccttctactcc

SEQ ID NO: 251155 - DNA, 3297 bp, synthetic construct
  misc_feature 1..3297: note = Description of Artificial Sequence: Synthetic coding sequence
  source 1..3297: mol_type = other DNA
atgtcgctgaacaactcctcgaacgtctttctggattcggtcccctctaacaccaatcgcttccaggtgtcagtgatcaacgaaaatcatgaatcaagcgcggcagccgatgataacaccgacccaccgcactacgaagaaacctctttcggcgatgaggcgcagaagcggctgcgcatctcttttagaccgggtaatcaggagtgctacgataactttctgcagtcgggcgagacggccaaaactgacgcatccttccatgcatacgactcccacaccaacacttactacctgcaaacgttcggacacaataccatggacgctgtgcctaaaatcgagtactaccgcaacactggatcgatctcgggacccaaagtcaaccggccgtccctgctggaaatccacgagcaattggcaaagaatgtcgcagtgacgccgagcagcgctgacagggtggctaatggagatggaattcctggagacgaacaagcagagaataaggaggacgaccaagcgggggtggtgaagttcggatgggtgaagggcgtcctcgtcagatgcatgctcaacatctggggcgtcatgctcttcatcaggctgtcgtggatcgtgggagaggccggaatcggcttgggggtgatcatcattgggctgagcgtggtggtgaccaccctgaccggaatctcaatgtccgcaatttgcaccaacggagtggtccggggcggaggagcctactacttgatcagccggtcattgggaccagaattcggtggaagcatcggactgatcttcgcgttcgccaacgccgtcgcggttgcgatgtacgtggtggggtttgccgaaaccgtggtggacctgctgaaggagagcgatagcatgatggtggacccgactaatgatatcagaatcatcgggtcaatcactgtggtgatcctgctgggcatctcagtggccggcatggaatgggaagcgaaagcgcaggtgatcctcctggtcatcctgctgattgccatcgccaacttcttcattggtaccgtgattccatccaataacgagaagaagtcaagaggttttttcaattaccaagcgtcgatcttcgccgagaattttggcccaagattcactaaaggagagggctttttctccgtgttcgccatcttctttccggccgctaccggcattcttgcgggagctaacatatccggcgatctggaggatccgcaggacgccatcccgcggggaaccatgttggccatcttcatcaccactgtcgcctacctcggggtggccatctgcgtgggagcctgcgtggtgcgcgatgccaccgggaatatgaatgacaccattatctccggaatgaactgcaatggctcggccgcttgcggcctgggctacgatttctcgcggtgccgccacgagccgtgccagtacggtctgatgaataactttcaggtcatgagcatggtgagcggtttcggccctctgattaccgctggtatcttctcggccaccctttccagcgccctggcgagcctcgtctcggccccgaaggtgtttcaggcactctgcaaggacaacatctacaaagcgctgcagttcttcgccaagggatacggtaagaataacgaacctcttcgcggatacatcctcactttcctcatcgccatggccttcatcttgatcgctgagctcaacactatagcccccattatctcaaacttctttttggcgtcatacgcactgataaacttttcgtgtttccacgccagctacgccaaatcgccgggatggcggcccgcatacggcatctacaatatgtgggtgtccttgttcggtgccgtcctgtgctgcgccgtgatgttcgtcattaactggtgggccgccgtgatcacttacgtcattgaattctttttgtacgtctatgtcacctgcaagaagccagacgtgaactggggatcctccacccaggctctctcgtacgtttcggcactggacaatgccctcgaactgaccactgtggaagatcatgtgaagaatttccgaccacagtgtatcgtgctcactggcgggccaatgacccggcccgccctgctcgacatcactcacgcgtttactaagaattccggtctgtgcatctgttgcgaagtttttgtggggccccgcaaactgtgtgtgaaggagatgaattcaggaatggcgaagaaacaggcatggctgatcaagaataagatcaaggccttttacgcagccgtcgccgcagattgcttccgcgatggggtccgcagtctgctgcaagcgtccggactggggaggatgaagccaaataccctggtgattggctacaagaagaattggagaaaggctccgctgaccgagatcgagaattacgtgggaatcatccatgacgcatttgacttcgaaatcggagtcgtgatcgtgcgcatcagccaaggattcgatattagccaggtgctgcaagtgcaggaagagctcgagcggctcgaacaggagcgcctggccctggaagccaccattaaagataacgagtgtgaggaggaaagcggcggtattcgcggcctcttcaaaaaggcggggaaactgaacatcactaagactacgccgaagaaagatggatcgataaacacttcgcagtccatgcacgtgggagaattcaaccaaaagttggtggaggccagcacgcaattcaaaaagaaacaagaaaaaggaaccatcgacgtctggtggctgttcgacgatggcggactgactctcctgattccttacattctgaccctccggaagaaatggaaggactgcaaacttcgcatatacgtcggaggcaagatcaatagaatcgaggaggaaaagattgtgatggcgtcgctcctgtcgaaattccggatcaagttcgccgatatccacatcatcggagacatcaacatccgccccaataaagaatcgtggaaagtgtttgaagagatgatcgaaccctaccgcctccacgaatcatgcaaggacctgaccaccgccgaaaaacttaagagagaaacgccttggaagattactgatgccgagcttgaggccgtgaaggaaaaatcctaccggcaggtccggctcaatgaactcctccaagaacactcccgagccgcaaatctgatcgtgctgtccctgccagtcgctaggaagggtagcatcagcgacctgctgtacatggcgtggctggagatccttactaagaacctgccgccagtgctgctggtccggggaaatcataagaacgtcctgaccttttactcc

SEQ ID NO: 251156 - DNA, 3297 bp, synthetic construct
  misc_feature 1..3297: note = Description of Artificial Sequence: Synthetic coding sequence
  source 1..3297: mol_type = other DNA
atgtccctgaacaactcttctaacgttttcctagactcagtgcctagtaataccaataggttccaagtgagtgttattaatgagaaccacgagagttctgccgctgctgacgacaatacagatccaccacactacgaagagacatccttcggcgacgaagctcagaagcggcttcgaatctcattccggcccgggaaccaggaatgttatgataatttcctacaaagcggtgagacagctaagactgacgccagctttcatgcctacgactcacacactaacacttactacctacagacgttcgggcacaatactatggacgcagttccgaaaattgaatactaccgcaatacgggctctatctccgggcccaaagttaaccgacccagccttctggagattcatgagcagttagccaagaatgttgccgttactccatccagtgctgaccgtgtggcaaatggtgacggtattcccggagacgaacaagcagagaacaaggaagacgaccaggcgggagtcgtcaaatttgggtgggttaagggcgtgctagtgcggtgcatgttgaatatttggggtgtgatgctgtttattcgcctcagctggatcgtgggcgaggctggaattggccttggcgtgattattatcgggctgtctgtcgtcgtcacgactctgacgggtatctcaatgtctgccatctgcacaaatggggttgtccgaggaggcggcgcctactatctgattagccgctccctgggcccagaattcggcggctcgatcgggctcatattcgccttcgctaatgccgtggctgtggcaatgtatgttgtgggcttcgcggaaacagtggtggatctcttgaaggagagcgattcaatgatggttgatccgaccaatgacatccgaatcatcggttccattaccgtggtgatcttgctgggtatatcagtggcaggcatggagtgggaggcaaaggcccaagtgatcctcctcgtcattctcctgatcgcgattgcaaacttctttatcggcacggtcattcccagtaacaatgagaaaaagagccggggcttcttcaactaccaggcatcaatttttgctgaaaactttggacctcgcttcacaaaaggtgaagggttttttagcgtcttcgctatcttttttccggccgctacaggcattcttgccggtgcgaacattagtggcgatttggaggaccctcaagacgccatcccgcggggtacgatgttggccatcttcattaccacagtggcgtatctgggagtcgcgatctgtgtcggtgcctgcgtggtccgcgacgccacaggcaatatgaacgacactataatatcaggcatgaactgtaatgggtccgctgcgtgcggcttaggctatgattttagtcgatgcagacatgagccatgccaatatggcctaatgaataactttcaggtgatgtcaatggttagtggatttggccccttgattaccgctggtatcttcagtgcgaccctgtcgtccgcccttgcctcactggtctctgcccccaaagtgttccaggctctctgtaaggataacatatacaaagcccttcagttttttgcaaaggggtatggcaaaaacaacgagccgttgaggggctatatcctgacattcctgatcgctatggcgttcatcttgattgccgagctcaacacgattgcacccataatcagcaattttttcctagcctcttacgcgctgatcaactttagttgttttcatgcatcttatgctaagtctccggggtggagacctgcctatggcatttataacatgtgggtgagtctgttcggcgccgtactgtgctgtgccgttatgtttgtcattaactggtgggcagccgtgattacctatgtcattgagttctttctgtacgtctatgtgacctgtaagaagccagatgtcaactggggaagtagcactcaagcactcagctatgtcagcgccttagacaacgccctggaactgactacagtggaggaccatgtcaagaactttaggcctcaatgcatcgtgctgactggagggcccatgacgaggcccgctctcttagatatcacgcacgcatttaccaaaaatagtgggctgtgcatctgctgcgaggtcttcgttggtccacggaaactctgcgtgaaggagatgaattcgggcatggcgaagaagcaagcatggctgattaaaaataaaatcaaagcattctatgccgccgtggctgctgactgtttcagggatggtgttagatctttgcttcaggcttccggcctaggaagaatgaagccaaataccctggtaattggctataagaagaactggcggaaggctccactgacggaaatagaaaattacgttggtataatccatgatgcattcgattttgagattggcgtcgtaatagttagaatatcacagggcttcgacattagtcaggttcttcaggtgcaggaggaactagagcggctcgaacaagaacgcctggccttggaagctacaattaaggacaatgagtgtgaagaggaatcgggaggcatcagggggctttttaagaaagcaggcaaacttaatataacaaaaacaacacctaaaaaagacgggagtattaacacttctcaaagtatgcatgtgggcgaattcaatcagaaactcgttgaggccagcacacagtttaagaagaagcaagagaagggcacaatagatgtatggtggctgttcgacgacggcgggcttacgctgctgatcccttatattctcactctaagaaagaaatggaaggactgcaaacttcgcatttacgtcggcggaaagattaatcggatcgaagaggagaaaatcgtgatggcttcacttctaagcaagttccgcatcaagttcgctgacatacatatcattggggacattaacatccggccaaataaggaatcttggaaggtgtttgaggagatgatcgagccctacaggcttcacgaatcatgcaaggatttgaccacggcggaaaagctcaaaagggagactccttggaaaataaccgacgccgagctcgaggccgttaaggagaagagctacagacaggttcggctgaatgaactgttgcaggagcattcccgcgctgctaacttgatcgtgctctcccttccggtagctcgtaagggaagcatatctgatctgctctacatggcatggttggagatcctgaccaagaacctcccgccagtgctcttagtgcgcggaaaccataagaatgtgcttaccttctactcg

SEQ ID NO: 251157 - DNA, 3297 bp, synthetic construct
  misc_feature 1..3297: note = Description of Artificial Sequence: Synthetic coding sequence
  source 1..3297: mol_type = other DNA
atgtcgctaaataattcgtcgaatgtttttttagattcggtaccgtcgaatacgaatcgttttcaagtatcggtaataaatgaaaatcatgaatcgtcggcggcggcggatgataatacggatccgccgcattatgaagaaacgtcgtttggtgatgaagcgcaaaaacgattacgaatatcgtttcgaccgggtaatcaagaatgttatgataattttctacaatcgggtgaaacggcgaaaacggatgcgtcgtttcatgcgtatgattcgcatacgaatacgtattatttacaaacgtttggtcataatacgatggatgcggttccgaaaatagaatattatcgaaatacgggttcgatatcgggtccgaaagtaaatcgtccgtcgctattagaaatacatgaacaactagcgaaaaatgtagcggttacgccgtcgtcggcggatcgagtagcgaatggtgatggtataccgggtgatgaacaagcggaaaataaagaagatgatcaagcgggtgttgtaaaatttggttgggttaaaggtgttttagttcgttgtatgctaaatatatggggtgttatgctatttatacgtctatcgtggatagttggtgaagcgggtataggtttaggtgtaataataataggtttatcggtagtagttacgacgttaacgggtatatcgatgtcggcgatatgtacgaatggtgtagtacgtggtggtggtgcgtattatttaatatcgcgttcgctaggtccggaatttggtggttcgataggtttaatatttgcgtttgcgaatgcggtagcggtagcgatgtatgtagtaggttttgcggaaacggttgttgatttattaaaagaatcggattcgatgatggtagatccgacgaatgatatacgaataataggttcgataacggtagtaatattactaggtatatcggtagcgggtatggaatgggaagcgaaagcgcaagttatactactagtaatactattaatagcgatagcgaatttttttataggtacggtaataccgtcgaataatgaaaaaaaatcgcgtggtttttttaattatcaagcgtcgatatttgcggaaaattttggtccgcgatttacgaaaggtgaaggttttttttcggtatttgcgatattttttccggcggcgacgggtatattagcgggtgcgaatatatcgggtgatctagaagatccgcaagatgcgataccgcgtggtacgatgctagcgatatttataacgacggtagcgtatttaggtgttgcgatatgtgtaggtgcgtgtgtagtacgagatgcgacgggtaatatgaatgatacgataatatcgggtatgaattgtaatggttcggcggcgtgtggtttaggttatgatttttcgcgatgtcgtcatgaaccgtgtcaatatggtttaatgaataattttcaagttatgtcgatggtatcgggttttggtccgctaataacggcgggtatattttcggcgacgttatcgtcggcgttagcgtcgttagtatcggcgccgaaagtatttcaagcgttatgtaaagataatatatataaagcgctacaattttttgcgaaaggttatggtaaaaataatgaaccgttacgtggttatatactaacgtttctaatagcgatggcgtttatattaatagcggaattaaatacgatagcgccgataatatcgaatttttttctagcgtcgtatgcgctaataaatttttcgtgttttcatgcgtcgtatgcgaaatcgccgggttggcgtccggcgtatggtatatataatatgtgggtatcgctatttggtgcggtattatgttgtgcggtaatgtttgttataaattggtgggcggcggtaataacgtatgtaatagaattttttctatatgtatatgtaacgtgtaaaaaaccggatgttaattggggttcgtcgacgcaagcgttatcgtatgtatcggcgttagataatgcgttagaactaacgacggtagaagatcatgttaaaaattttcgtccgcaatgtatagttctaacgggtggtccgatgacgcgaccggcgttattagatataacgcatgcgtttacgaaaaattcgggtctatgtatatgttgtgaagtatttgtaggtccgcgtaaactatgtgtaaaagaaatgaattcgggtatggcgaaaaaacaagcgtggctaataaaaaataaaataaaagcgttttatgcggcggtagcggcggattgttttcgagatggtgtacgttcgctactacaagcgtcgggtttaggtcgaatgaaaccgaatacgctagtaataggttataaaaaaaattggcgtaaagcgccgctaacggaaatagaaaattatgtaggtataatacatgatgcgtttgattttgaaataggtgtagttatagttcgtatatcgcaaggttttgatatatcgcaagtactacaagttcaagaagaactagaacgtttagaacaagaacgactagcgttagaagcgacgataaaagataatgaatgtgaagaagaatcgggtggtatacgaggtttatttaaaaaagcgggtaaactaaatataacgaaaacgacgccgaaaaaagatggttcgataaatacgtcgcaatcgatgcatgttggtgaatttaatcaaaaattagttgaagcgtcgacgcaatttaaaaaaaaacaagaaaaaggtacgatagatgtttggtggctatttgatgatggtggtttaacgttactaataccgtatatattaacgctacgtaaaaaatggaaagattgtaaattacgaatatatgtaggtggtaaaataaatcgtatagaagaagaaaaaatagtaatggcgtcgttattatcgaaatttcgtataaaatttgcggatatacatataataggtgatataaatatacgaccgaataaagaatcgtggaaagtttttgaagaaatgatagaaccgtatcgtttacatgaatcgtgtaaagatctaacgacggcggaaaaattaaaacgtgaaacgccgtggaaaataacggatgcggaattagaagcggtaaaagaaaaatcgtatcgacaagttcgtctaaatgaattattacaagaacattcgcgagcggcgaatctaatagtactatcgctaccggttgcgcgaaaaggttcgatatcggatctattatatatggcgtggttagaaatattaacgaaaaatctaccgccggttttattagttcgtggtaatcataaaaatgtattaacgttttattcg

SEQ ID NO: 251158 - DNA, 1476 bp, synthetic construct
  misc_feature 1..1476: note = Description of Artificial Sequence: Synthetic coding sequence
  source 1..1476: mol_type = other DNA
atggagccgtcgtcaaagaagctgactggacggctgatgctcgcagtcggtggagctgtgcttggctcgttgcaattcggatacaatacgggggttatcaatgcgcctcagaaagtcattgaagaattctacaaccagacttgggttcaccgttacggagagtccatcctcccaaccactctgaccaccctctggtcgctcagcgtggcgatcttcagtgttggcgggatgatcgggtcgttttcggtcggactctttgtgaaccgcttcggacggaggaactcaatgcttatgatgaatctgctggcgtttgtgtcggcggtcctgatggggttctcaaaactcggcaagtccttcgaaatgctgattctggggcggtttatcatcggggtgtactgcggcctgactaccggatttgtgcctatgtacgttggcgaagtctcaccaaccgcactgagaggagccctcggaaccctccatcagttgggaattgttgttggaatcctgattgcgcaagtgttcggactggactcgatcatgggtaacaaagacctgtggccgctgctcctcagcatcatctttatccctgcgctgctgcaatgcattgtcctgcctttctgcccggaatccccgcggttcctgcttatcaacagaaatgaagaaaaccgcgccaagtccgtgctcaaaaagctgcgagggacggcggatgtgactcacgacttgcaggaaatgaaggaggagagccggcagatgatgagggagaagaaggtgaccatcttggaacttttcaggtcaccggcctatcgacagccgatcctgatcgccgtggtcctgcaattgtcgcagcaactcagcggtatcaacgcagtgttctattactcgaccagcatcttcgaaaaagcgggggtgcagcagccagtgtacgctaccattggaagcggaatcgtgaacactgccttcaccgtggtgtcgctgttcgtggtcgaacgggcaggcagacggaccttgcacctgatcgggttggctggtatggctggatgcgctatcctgatgaccatcgccctggctctgctggagcagctcccttggatgtcgtacctgtcaatagtcgctattttcggattcgtggccttcttcgaagtgggaccgggaccaatcccttggttcattgtggcggaattgtttagccaaggaccgcgcccagcggccatcgcggtggcaggattcagcaattggacttcaaacttcatcgtgggaatgtgcttccaatacgtcgaacagctgtgtggaccgtacgtctttatcattttcacggtgctcctggtgttgttctttatctttacctacttcaaggttcctgagactaaaggccggactttcgatgaaatcgcttcgggtttccggcagggcggcgcgtcacagagcgataagaccccagaggagctctttcatccgctcggagcggattcccaagtg

SEQ ID NO: 251159 - DNA, 1476 bp, synthetic construct
  misc_feature 1..1476: note = Description of Artificial Sequence: Synthetic coding sequence
  source 1..1476: mol_type = other DNA
atggaaccgtcttctaagaaactgactggtaggctgatgctagccgtggggggcgccgttctcggatcattgcagttcggatacaacaccggggtgattaatgcgccacaaaaggtgatagaggagttctataatcagacgtgggtccaccgctatggagaatccatattgcctaccacactgactacactgtggagtctgtcagttgccattttctccgtaggaggcatgattggctctttcagcgttgggctattcgtcaatcgcttcggtcgacgcaattccatgcttatgatgaaccttttggcctttgtgtcggctgtcctcatgggctttagtaagctggggaagagtttcgagatgctcatcttagggcggtttatcatcggagtttactgtggcctcaccactggtttcgtgcctatgtatgttggcgaggtttccccaactgcactgaggggagcgctcggcacactccaccagctgggaatcgtcgttgggattctgattgcccaggtctttggcctggactccatcatgggaaacaaggacctttggccactccttctcagcattatcttcatcccagctttactacaatgtatcgtactacccttttgtcctgagagccctcgattcctactgataaaccgtaatgaggaaaatcgggccaaatcagtgttgaagaagttgagggggactgcagacgttacccacgatcttcaggagatgaaagaggagagcagacagatgatgcgtgaaaaaaaggtcactatcctggagctgttccgcagcccagcatatcggcagcctatcttgatcgccgttgtcttgcaactctctcagcagttatccgggatcaatgccgtgttttattattctacatctatatttgaaaaagctggggtccagcaacctgtatacgcaaccatcggcagtggtatcgtaaataccgccttcacggtagtttccttattcgtcgtcgagcgtgctgggcgcaggacactgcaccttataggcctagccggcatggctgggtgcgctatcctgatgaccattgctcttgcgttgttggagcaactgccctggatgtcatatctgagtatcgtagccattttcgggttcgtggcgttttttgaagtcggacccggccctatcccatggttcatcgtggccgaattattctctcaaggcccccgtcctgccgctattgcagtggcgggtttctcaaactggaccagcaacttcatcgttggaatgtgtttccagtacgtggagcagctctgcggaccatacgtgtttataatctttactgtgttgctggtgctgttctttatctttacctactttaaagtacccgaaactaagggccgcaccttcgacgagatcgccagtggttttcgccaaggtggcgcaagccagagcgacaagacacccgaagaactcttccatcctctgggagcagattcgcaggtc

SEQ ID NO: 251160 - DNA, 1476 bp, synthetic construct
  misc_feature 1..1476: note = Description of Artificial Sequence: Synthetic coding sequence
  source 1..1476: mol_type = other DNA
atggagccttcctcaaaaaagttgactggaagactcatgcttgctgtcggcggggccgtgctgggcagtctacagttcggttataataccggagtcatcaatgccccacagaaagttattgaagagttctacaaccagacttgggtacaccgatatggcgaaagcattcttcctacgactctcacgactttgtggagcctctcagtggcaatcttttctgttggcggtatgataggaagcttttctgtgggtctgtttgtcaaccgctttggcagacgcaattcaatgctgatgatgaacctgcttgcttttgtatcggccgtcctgatggggttcagcaagctcggcaagtcttttgagatgctgatcctagggagattcatcataggggtctactgcggtcttaccacaggcttcgtccccatgtacgtgggggaagtgtccccaactgccttgaggggagccctcggcaccctgcaccaactcggaatagtggtcggcattctgattgctcaggtgttcggcctggactcaattatggggaataaggacctttggcccctgctactgtctattattttcattcctgctctgctgcagtgcatcgtgttgcccttttgcccagagagcccgcgattcctactgataaatcgcaacgaggaaaaccgcgccaagagtgtgctcaagaaactacgcggtacggcagacgtgacgcatgatttgcaggagatgaaagaagagtcccggcaaatgatgcgcgaaaaaaaagtgacgattcttgagctgttccgttctcccgcctataggcagcctattctgatagctgtggttctgcagcttagtcagcaactctctgggattaatgcggtcttctactactcgacctctatattcgagaaggcgggagtgcagcagccagtgtatgcgactatcggatccggcatcgttaatactgcatttactgttgtaagtctgttcgttgtagagagagccggccgaaggacactgcatctgatcggccttgctgggatggcaggttgtgctattcttatgacaattgcgttggctctgctggaacagttgccgtggatgtcttatttgagcatcgttgcgatttttggatttgtggcattctttgaggtcgggccgggcccgattccttggtttattgttgccgagctgtttagtcagggaccacgtcctgccgccatcgctgtggctggcttctctaactggacgtctaactttattgttggtatgtgctttcagtatgtggaacagctgtgcggcccgtacgtgttcatcattttcacggtcctgctcgtgttgtttttcatctttacctatttcaaagttccagagaccaagggaaggacatttgacgagatcgccagcggcttcagacaggggggagccagtcagtccgataaaaccccagaagaactatttcaccctttaggcgcagacagtcaggtg

SEQ ID NO: 251161 - DNA, 1476 bp, synthetic construct
  misc_feature 1..1476: note = Description of Artificial Sequence: Synthetic coding sequence
  source 1..1476: mol_type = other DNA
atggagccaagttcgaaaaagcttacgggaaggctaatgctggccgtcggcggagccgtgctgggaagtctgcaattcggctataacaccggcgtgattaacgccccgcagaaggtgatcgaggagttctacaaccaaacctgggtgcaccgctacggcgagtctatactccccacgaccctgaccacgctgtggtccctctcggtggccatcttcagcgttggaggtatgatcggaagtttttcggtgggtctgttcgtgaataggtttggacgtcgcaactccatgctgatgatgaacctgctggcatttgtctcggccgtactgatgggattcagtaagcttggcaagagcttcgaaatgctgatccttggtagatttataataggcgtgtactgcggattgaccacaggttttgtgccgatgtatgtgggcgaggtttcaccaacagcgctgcgcggcgcccttggcacactccatcaattaggcatcgtagttggtatccttattgcgcaggtgtttggtctagacagtataatgggcaataaggatctctggcccctgctgctaagcatcatttttatcccagcactattgcagtgcattgtactgcctttctgccccgagtcaccaagattcctactgatcaatcgcaatgaggaaaatagggccaagagcgttctcaagaagctccgcggaaccgccgatgtcacacatgacctccaggagatgaaggaagagtcgcgccaaatgatgcgcgagaagaaagtaaccatcttggagctgtttaggtcgccggcctacagacagcctatcctgattgcagttgttctgcagctgtctcagcaactgtcaggcattaacgcagtgttctattattccacatcgatcttcgagaaagccggagtgcagcagcccgtgtacgcaacgattggcagcggcatagtgaacacagcatttaccgtcgtgagcctcttcgtggttgaacgcgccggccggcggacactgcatttgataggactggccggcatggccggatgcgccatcctgatgaccatcgcgttagccctgctagagcaactgccatggatgtcgtatctgtccattgttgccatcttcggctttgttgcgttttttgaggtcggcccaggtcccatcccctggtttatcgtcgcggagctatttagtcagggaccacgaccagctgcgattgctgtcgcgggcttctcaaactggacttccaattttatcgtgggcatgtgtttccagtatgtggagcaattgtgcggaccctacgtattcatcatattcactgttttactggtactgtttttcatattcacttacttcaaggtgccagaaacgaagggccgtacgttcgatgaaattgcctcgggatttcggcagggaggagcatcccagtccgacaagacgcctgaggagttgttccatcctcttggagccgacagccaggta

SEQ ID NO: 251162 - DNA, 1476 bp, synthetic construct
  misc_feature 1..1476: note = Description of Artificial Sequence: Synthetic coding sequence
  source 1..1476: mol_type = other DNA
atggagccctcgtcgaagaagttgactggacgacttatgctggcagtgggaggagccgtgcttggatcacttcagttcggctacaacaccggggtcatcaatgcacctcaaaaggtgatcgaagagttttacaaccaaacttgggttcaccgatacggagaaagcatccttccgaccaccttgaccactctgtggagcctttcagttgcgatcttttccgtggggggaatgattggatcattttcggttggactttttgtcaacagatttggtaggcgaaactcgatgctgatgatgaatcttctggcattcgtgtcggctgtgctgatgggtttttccaagctcggcaaatcgtttgaaatgcttatcctgggccgcttcataattggtgtgtactgcgggcttactactgggttcgtcccaatgtacgtcggcgaggtcagcccaactgcgctgcgcggagcactgggcacccttcatcagctgggaatcgtcgtgggaattctgatagcacaagtgtttggccttgactccattatgggtaacaaagacctgtggccgctgcttctcagcattatctttatacctgcactgctgcagtgtatcgtgcttcccttttgtcccgaatcgccccggttcctgctcattaaccgcaatgaggagaaccgcgctaagagcgtcctgaaaaaactgaggggtaccgccgacgtgacccacgatcttcaggaaatgaaggaggaatcccggcaaatgatgcgggaaaagaaagtcaccattctcgagctgtttagatcgccagcatacagacagcctatccttattgcggtggtcctccagctttcgcaacaactgtcgggaatcaatgcagtcttttactactcgacttccatcttcgaaaaggcaggcgtgcaacagccagtatacgccaccataggatcgggcatcgttaacaccgcctttacggtggtgtcgctgtttgtggtggaaagagcaggtagacggacccttcacttgatcggactcgctggtatggcaggatgtgcaattctcatgactatcgccttggcgctgcttgaacaactgccttggatgtcctacctgagcattgtcgcaatctttggttttgtcgccttcttcgaagtgggacctggacctattccatggttcatagtggcagaactgttttcccaggggcctcgcccagcagctattgctgtggccggtttttcaaactggacttcgaatttcattgtgggaatgtgttttcaatacgtggaacaactttgcggaccttacgtctttatcatctttaccgtgctccttgtcctgtttttcatctttacttactttaaggtccctgagactaaaggtagaactttcgatgagattgcaagcggatttagacaggggggcgcgtcacaatctgataagactcctgaagaactgttccacccccttggcgcagattcccaagtc

SEQ ID NO: 251163 - DNA, 1476 bp, synthetic construct
  misc_feature 1..1476: note = Description of Artificial Sequence: Synthetic coding sequence
  source 1..1476: mol_type = other DNA
atggagcccagttcaaaaaaactgactggtagacttatgctggccgtgggcggggcagtgctgggcagcctgcagttcggatacaatacaggggtgatcaacgcaccacagaaagtgattgaagagttttacaatcaaacatgggttcatcgatatggagagtccattctaccaacaacgctaaccactctctggtccctatcagtcgccattttttcagttggaggaatgattgggtccttttcagtgggactgtttgtaaaccgctttgggcgccgcaacagcatgctgatgatgaacctcttagcgttcgtttcagccgtactaatgggctttagtaagttgggaaaatcattcgaaatgctaatattgggaaggttcattattggagtgtattgcggtctgaccactgggttcgtgccaatgtatgtaggagaagtatctccaacagcccttagaggtgcgctcggcacattgcaccagttaggaattgtggtaggcatcctgatagctcaggtctttgggctggactctattatgggcaacaaagacctgtggccattgcttctatccataatttttatcccggccctgttgcaatgtatcgtcttacctttctgcccagaatcccctcgttttctgttgattaacaggaacgaggagaacagggccaagagcgtgctcaagaaactgcgtggaacagcagacgttacccacgacctgcaggagatgaaggaggagagtcggcagatgatgcgcgagaaaaaagtgacaatcttggagctgtttcgctcgcccgcatatcgccagccgatcctcatcgccgttgtccttcaacttagccagcagctcagcggaatcaatgctgttttttattactccacctcaattttcgagaaagctggggtacagcagcccgtgtatgctactatcggaagtggcattgtcaacaccgccttcaccgtcgtctccctgttcgttgttgagcgggcaggcaggcgcactctgcacttgattggcctggccggcatggcaggctgtgccattctgatgacaatcgcattggcactgctagagcagctcccatggatgtcctacttgtctattgttgccatctttggcttcgtagcgtttttcgaggtcggccccggaccaatcccgtggttcatcgttgctgaattattcagccagggtccaaggcccgcggcaattgctgtagccgggttctctaattggacctccaacttcattgttggtatgtgtttccaatatgtcgaacagctttgtggtccttacgtgttcatcatatttacggtgctgctggttctcttctttatattcacatatttcaaagtgcctgagaccaagggccgcacctttgacgagatagcctctgggttccgacaggggggcgcttcccagtccgacaaaacgcctgaggagttgtttcacccgcttggggcagactcacaggtg

SEQ ID NO: 251164 - DNA, 1476 bp, synthetic construct
  misc_feature 1..1476: note = Description of Artificial Sequence: Synthetic coding sequence
  source 1..1476: mol_type = other DNA
atggaaccaagcagcaagaagctcaccggccgcctgatgctggcagtgggtggtgcggtgcttggttcgctgcagtttggatacaacactggtgttatcaacgcccctcagaaggtgatagaggagttttacaaccaaacttgggtgcatcgctacggagaatcgatacttccaacgaccctcactactctgtggtcgctgtccgtggctatcttctcagtcggtgggatgatcggatccttctcggtgggactgttcgtgaatcggtttggtagacgaaactctatgcttatgatgaacctgcttgcattcgtctccgcagtccttatggggttttccaaactcggaaagtcctttgagatgctgatcctcggtaggttcattatcggagtgtactgtggactgactaccggattcgtccctatgtacgtcggggaagttagcccgactgcgctgcgcggggcactgggaactctgcatcaacttggtattgttgtgggtattcttattgcacaagtgttcggtcttgattcgattatgggtaacaaggatctgtggccccttcttctttcaatcatctttatcccagctctcctccaatgtattgtgcttccgttttgtcccgagtcgcctagatttctgctcatcaacaggaatgaagaaaatcgagcgaagtccgtgcttaagaaacttagaggaaccgcagatgtgactcatgacctccaagagatgaaagaagaatcgagacaaatgatgagagaaaagaaggtgacgatacttgagctgtttcgctcgcccgcataccgacagcctattttgattgctgtggtcctccaactgtcccagcagctctcaggaatcaacgcagtgttttactattccacctcgatctttgagaaagcaggtgtccaacaacctgtgtacgcaactattggttcggggattgtcaatactgccttcactgtcgtctcccttttcgtggtggaacgcgcaggtaggagaacccttcatcttattggactggctggaatggcaggatgtgcaatccttatgaccatcgcacttgcactgctcgaacaactgccttggatgtcataccttagcattgtggcaatctttggttttgtggcgttcttcgaagtcggacctgggcccataccttggtttatcgtcgcagagctgttttcacagggaccccgtccggcagcaatcgcagtcgcaggattctcgaactggactagcaactttatagtgggaatgtgttttcagtacgtggagcagctgtgcggtccatacgtgttcatcattttcactgtgcttctggtgctgttctttatctttacctactttaaggtgcctgaaactaagggccgaacctttgatgaaattgcgtcgggattcagacaaggaggagcatcccagtccgacaaaacccctgaagaacttttccaccctctcggcgcagactcacaggtc

SEQ ID NO: 251165 - DNA, 1476 bp, synthetic construct
  misc_feature 1..1476: note = Description of Artificial Sequence: Synthetic coding sequence
  source 1..1476: mol_type = other DNA
atggagcctagctccaaaaagctgaccggtaggcttatgctggcagtgggcggggcagtcctgggctcactgcagtttggctacaataccggggtgattaacgcaccccaaaaggttattgaagaattctataatcaaacttgggtgcatcggtacggcgagagcattcttcctactaccctgactactctgtggtcgctgagcgtggccattttctcagtgggcggtatgataggatcgttctcggtcgggttgtttgtgaatcgattcggacgaaggaatagcatgctgatgatgaacctgttggcatttgtgtccgcggtcctgatgggtttttccaagctgggcaagtcctttgaaatgctgatccttggacgcttcattataggcgtctactgcggtcttaccacgggatttgtcccgatgtacgtgggagaagtgtcaccgacggcactccgtggagcccttggaactctccatcagctgggtatagtggtgggaattcttattgcacaagtctttggactggattcgataatggggaataaggacctgtggccacttcttctgtcaattatctttatcccagcgcttctgcagtgtatcgtccttcctttttgccccgagtccccacgattccttctgattaacaggaacgaggaaaacagagcaaagtccgtccttaagaagctgaggggtactgcagatgtgactcacgaccttcaagaaatgaaggaagaatccagacagatgatgcgggaaaagaaagtcactattctcgaactctttaggtcccctgcctacagacaacccatcctcattgccgtggtcctgcagctgtcacagcagctgtccggtattaacgctgtgttttactactccacctcgatttttgagaaggcaggggtgcagcaacctgtctacgccactatcggttcgggcatagtgaacaccgcttttaccgtcgtctcgctgtttgtggtggagagagcagggcgccgtactcttcacctcattggtttggctgggatggcgggttgtgcaatccttatgaccattgctcttgcacttcttgagcagcttccttggatgtcctatctgtcgattgtggcaattttcggatttgtggccttctttgaagtgggacctggaccaatcccgtggtttattgtggcagagctgttctcccaaggacctagacctgctgcaatagcagtggcaggattttctaactggacttcaaactttattgtcggaatgtgtttccaatacgtggagcagctttgtggaccttacgtgtttatcatcttcaccgtgctcttggtcttgtttttcatctttacctactttaaagttcctgaaaccaaagggcgcaccttcgatgaaattgcatcggggttcagacagggtggcgcatcacaaagcgacaagacgcctgaggaactctttcacccactgggagcagattcccaagtg

SEQ ID NO: 251166 - DNA, 1476 bp, synthetic construct
  misc_feature 1..1476: note = Description of Artificial Sequence: Synthetic coding sequence
  source 1..1476: mol_type = other DNA
atggagccttcgagcaaaaagctgaccgggagactgatgttggcagtgggcggagcagtgctggggtccctacagtttggctacaatacgggtgtgattaacgccccgcagaaagtcatcgaggaattttataaccagacttgggtgcaccgctacggggaatccattctccctacaacgttgaccaccttgtggagcctgagcgtggcaattttcagtgtcggcggcatgatcggtagcttctctgtgggtctcttcgtgaataggtttggtcgcaggaacagcatgctgatgatgaacctgctggccttcgtgtccgcagtgctcatggggttctccaagttggggaaaagtttcgagatgctgatccttggccgcttcatcatcggcgtgtactgcggcctgaccactggattcgtccctatgtacgtcggagaggtgagcccaactgcgctgcgcggcgccctgggcactctgcatcagctgggcattgttgtgggtatcctcatcgcgcaagtcttcggactcgactcgattatgggcaacaaggacctctggccattgctgttatcgattatcttcatcccggcactcctgcagtgtattgttttaccattttgcccggaatccccacgatttctgctgatcaaccgcaacgaggagaatcgcgccaagtccgtgttaaaaaagcttcgcggtaccgctgacgttacccatgacctccaggaaatgaaggaggagtcccgccaaatgatgagggagaaaaaggtgaccattctggagttgttccggagcccggcctatcgccagcctatcctgattgctgtggtactgcaactgtcgcaacaactgagcggcattaacgcagtcttctactacagtacctccatcttcgaaaaagccggcgttcagcaaccggtctatgccactattggcagcgggattgttaacacggccttcactgtggtcagcttgtttgtggtcgagcgcgcggggcgccgcacccttcatctgataggcttggctggtatggcaggttgcgccattttaatgacgattgctttggccctgttggagcagctgccttggatgtcatatctgagcatcgtcgccatatttgggttcgtggctttctttgaggttggccccggaccaatcccgtggttcatcgtcgcggaattgttctcccaaggacctcgcccggcagcgatcgcagttgccggtttctctaattggacgtccaactttatcgttggcatgtgtttccagtacgtggaacaactctgcggcccgtatgtgtttattatcttcactgtgctcctggtgttgttcttcatttttacctactttaaggtaccagagacgaagggccgcaccttcgatgagattgctagcggattcaggcagggcggagcttcccagagcgataagacccctgaggaactgttccatcctctgggcgcggattcccaggtg

SEQ ID NO: 251167 - DNA, 1476 bp, synthetic construct
  misc_feature 1..1476: note = Description of Artificial Sequence: Synthetic coding sequence
  source 1..1476: mol_type = other DNA
atggaaccttcgtcaaaaaagctgaccggtcgtttgatgctggcggtcggtggtgccgtgctggggtcgcttcagtttgggtacaacactggtgtgattaacgcaccccagaaggtcattgaagagttttacaaccagacgtgggtccacagatatggcgaaagcattctgcccaccactctcacgactctctggtcactttccgtggcaatcttttcggtcggtggtatgatcggtagcttttctgtgggcctgttcgtgaatagatttggtagacgaaattccatgctgatgatgaacctcctggccttcgtgtcggcagtcctgatgggcttctcaaagctgggaaagtcgttcgaaatgctgattctgggtcgttttatcataggagtgtactgtggacttaccacgggctttgtcccaatgtacgttggagaggtgtctcctactgcgcttcgcggggcactgggaaccctgcaccagctcggcatcgtggtgggaatcctgattgcccaagtgttcggtttggacagcattatgggcaacaaggacctgtggcctcttcttctgtcgatcatattcatccctgcacttctgcagtgtatcgtcctgccattttgccctgaaagcccaaggttcctgctcattaaccggaatgaagagaacagggcaaaatcagtgttgaagaaactccggggaactgccgatgtcactcatgaccttcaggaaatgaaagaagaatctcgtcagatgatgcgcgagaagaaggtcaccattctcgaactcttccgctcgccagcatacaggcaacccattctcattgctgtggtgcttcaactgtcccaacagctttccggcatcaatgcagtgttttactactccacttccattttcgagaaggctggagtgcaacaaccagtctacgcaaccatcggaagtgggatagtgaacaccgctttcactgtggtgtcactgttcgtggtggaacgggccggacgacgtacccttcatcttattggactggccggtatggcaggttgcgcaattctgatgaccattgccctggcgctcctcgaacaacttccatggatgtcatacttgtcaattgtggcaattttcggatttgtggccttttttgaagtgggacctggaccgattccatggttcattgtggccgaacttttttctcagggaccccgtcccgccgctatcgctgtcgccggtttttcgaattggacgtcgaacttcatcgtcggcatgtgctttcaatacgtggaacagctttgtggaccctacgtgttcataatcttcactgtcctgctggtgctgtttttcatcttcacctacttcaaggtcccagaaactaagggaagaaccttcgatgagatcgcttcggggtttcgtcagggtggagcatcgcaatccgacaaaacccctgaggaactctttcaccctcttggggcagatagccaagtg

SEQ ID NO: 251168 - DNA, 1476 bp, synthetic construct
  misc_feature 1..1476: note = Description of Artificial Sequence: Synthetic coding sequence
  source 1..1476: mol_type = other DNA
atggagccctctagtaagaagctcaccggccgtttgatgctggcagttggcggtgcagtactgggttccttgcagttcggttacaataccggcgtgataaacgctccccaaaaagtgatcgaggaattctataatcagacctgggtccaccgctatggagagtccattctgccaactactctgacaactctctggtccctttccgtggctatattttctgtgggtggaatgattggatcattcagcgttggcctcttcgtaaacaggtttggccgccgcaattctatgctgatgatgaatcttctcgctttcgtctccgctgtcctcatgggattcagcaaactcggaaagtcattcgagatgcttatcctgggcagatttatcattggcgtgtattgtggacttaccacaggtttcgttccaatgtacgttggcgaggtctctcccaccgccctgaggggagctctcggcacacttcaccagcttggaattgtcgtgggtatcctgattgctcaagtgttcggacttgacagtattatgggaaacaaggatctttggccactgcttctcagcatcatctttatccctgccttgttgcagtgcattgttttgcccttctgccccgagtcacccagattcctgttgatcaacaggaacgaggagaaccgtgctaagtcagtacttaagaagctgaggggcactgccgacgtgacccatgacctgcaggaaatgaaagaggagagtaggcagatgatgagggaaaagaaggtcacaatactggaactcttcaggagtcctgcttaccgccaacccatacttatcgccgtggtactgcagctcagtcaacagctgtccggcattaatgcagttttctattacagcacatctatctttgaaaaggccggagttcaacagcccgtgtacgctacaatcggatccggcatcgtgaacaccgctttcactgtcgtgtctctcttcgtggtcgagcgtgctggtaggcgtactctgcacttgatcggactggctggtatggccggctgcgccatcttgatgaccatcgctttggcattgttggagcaactcccttggatgtcttatctctcaatagtggctatctttggcttcgttgccttcttcgaggtgggacccggaccaattccctggttcattgtagcagaattgtttagtcaaggtccacgcccagctgctattgccgttgctggtttttcaaactggacatctaattttattgtaggaatgtgcttccagtacgtggagcagctgtgcggaccatatgttttcatcatttttactgtcttgctggtgctctttttcatcttcacatacttcaaggtacccgaaactaaaggcaggacattcgatgagatcgcatcaggttttcgccaaggtggcgctagccaatcagacaaaactccagaagaactgtttcatcctcttggcgccgacagccaagtt

SEQ ID NO: 251169 - DNA, 1476 bp, synthetic construct
  misc_feature 1..1476: note = Description of Artificial Sequence: Synthetic coding sequence
  source 1..1476: mol_type = other DNA
atggagccttcaagcaagaaacttaccggacggctcatgttggcggtgggaggagccgtcctgggctccctccagtttggatacaacacgggcgtgatcaatgccccccagaaggtgatcgaagagttttacaaccaaacttgggtgcaccgctacggagagtcaattcttcctaccacccttaccaccctctggtccctctcggtcgcaatcttctcagtgggaggaatgattggttcattctccgtgggcctgttcgtcaaccgcttcggcaggaggaactcaatgctgatgatgaatcttctcgccttcgtgtctgcggtgctcatgggattctccaagctgggcaaatccttcgaaatgctgatccttgggagatttatcattggagtgtactgtggcctgaccactggcttcgtgcctatgtatgtgggcgaagtctcaccgaccgccctgcgcggggccctgggaaccctccaccagttgggaatcgtcgtgggaattctcatcgctcaagtgttcggacttgactccattatgggaaacaaagacttgtggccactgttgctctcgatcatcttcattcctgccctgctccagtgtattgtgctgcctttctgccccgaatcgccgcggttcctgctgatcaaccggaacgaggaaaatcgcgccaagtcagtgctgaagaaactccgggggaccgcagatgtcactcatgacctccaggaaatgaaggaagaatcgcggcaaatgatgcgggaaaagaaagttaccattctcgagctgttccgttccccagcctaccgccagccaattcttatcgcggtggtcctccagctgtcgcagcagctgtcgggtatcaacgctgtgttctactattcgactagcatcttcgagaaggccggggtccaacaaccagtctacgctactattggttctggaatcgtgaataccgcatttaccgtggtgtcgctgtttgtggtggaacgcgccggccgacggaccctccatttgatcggattggccggcatggcgggctgcgcaatccttatgaccatcgcactcgcactgttggagcaactcccgtggatgagctacctttcaatcgttgcaatcttcgggttcgtggcgttctttgaggtgggcccgggaccaatcccgtggttcatcgtcgctgaactgttttcacagggcccgcgtcccgctgccatcgcggtggccggctttagcaattggacttcgaacttcattgtgggtatgtgcttccaatacgtcgagcagctgtgcggcccctacgtgttcatcattttcacggttctcctggtcctgttcttcatcttcacgtactttaaggtgcctgaaaccaagggaagaaccttcgacgaaatcgcctccggcttccgccagggaggagcctcacagtcggataaaaccccagaggagcttttccaccctctgggcgccgattcgcaagtg

SEQ ID NO: 251170 - DNA, 1476 bp, synthetic construct
  misc_feature 1..1476: note = Description of Artificial Sequence: Synthetic coding sequence
  source 1..1476: mol_type = other DNA
atggagcccagcagtaagaagctgacaggcagacttatgctagccgtgggcggcgctgtgttgggcagtctgcagtttggctataacaccggcgtcattaacgcaccacagaaagtgattgaggagttctacaaccagacctgggtgcacagatacggcgagtccattctgcccactactcttacaacactgtggagtctatctgtagctattttctccgttggcgggatgatagggagtttctccgtgggcctgttcgtgaatcgcttcggaagacgtaattcaatgctcatgatgaacctgttggcatttgtctctgccgtgctgatgggctttagcaaactgggcaaatccttcgaaatgctgatccttgggcggtttataataggcgtgtattgcggcctgaccacaggatttgttcccatgtacgttggggaagtgtccccaaccgctctccgcggcgcactgggtacactccaccagctgggaattgtcgtcggcatcctgatcgcgcaggtatttgggctggactctatcatgggcaataaggacctttggcctctccttctgtccattattttcatcccggcccttctacagtgtattgtgttgcccttttgtccagagtcaccgaggtttctattgattaatcgcaatgaggagaaccgggcaaagtcagttctgaaaaaactgcgcggtaccgcagatgtgacccatgacctacaagaaatgaaggaggaaagcagacaaatgatgcgggaaaagaaggtcaccatactggagttgttccgcagccccgcttaccggcagcctattcttatcgctgtggtccttcagctttcacagcagctctctggcattaatgccgttttctattactctacctccatctttgagaaggcgggcgtccagcagcctgtctacgccaccatcggatccggcattgttaacactgccttcacggttgtgtccctgtttgttgtggaaagagccggcagacgtaccctgcatttaattggcctggccggtatggccggttgtgctattctgatgacaatcgccctggccctactggagcagctgccatggatgtcctacctgtcgatcgtggctatcttcggattcgtggccttcttcgaagtgggtcctggacctatcccctggttcattgtggcagaactcttctcccagggaccacgaccagcagccatagccgtagcaggattctctaactggacgtctaatttcatcgtagggatgtgtttccagtacgttgagcagttatgcgggccctacgtgttcataatcttcacagttctgttagtgttgttcttcatctttacatatttcaaagtgcccgagacgaaggggcgcacatttgacgaaattgcttctgggttccgccaggggggcgcctctcagagcgataagactcccgaggagctcttccatcctctgggagccgattctcaggtg

SEQ ID NO: 251171 - DNA, 1476 bp, synthetic construct
  misc_feature 1..1476: note = Description of Artificial Sequence: Synthetic coding sequence
  source 1..1476: mol_type = other DNA
atggagcctagcagcaagaagctcacagggagattaatgctggctgtcggtggcgccgtgcttggatcactccagttcgggtataacaccggcgttatcaatgcaccgcaaaaagtcatcgaggaattttataatcagacttgggtacatcgttacggggagagcatcctgccaacgaccctcacgacgctttggtctctttcggttgcaattttctcagtgggcggcatgatcggctccttttctgtcggcctattcgttaaccgttttggaagaagaaactcaatgcttatgatgaatctactagcttttgtcagtgctgtcctgatgggattctccaagctggggaagagtttcgagatgctcatcttaggacgttttattattggagtgtattgcggcctcaccactggattcgtccctatgtacgtaggagaagttagtccgactgctctccgcggggccctgggaacactgcaccagcttggcattgtggtggggattttgatcgcacaggtgtttgggttagactccatcatgggtaacaaagatttgtggccactgcttctgagcattatttttataccagcattgctgcagtgtatagttctaccgttctgtcccgaaagcccacgctttttgctcataaataggaacgaggagaacagagcaaagtccgtgctcaaaaagttaagaggaacggctgacgtgacacatgatctccaggagatgaaagaggagtccagacagatgatgcgggagaaaaaggtaaccattcttgaactgtttagaagtccagcatacaggcagcccatattgatagctgttgtactgcagctgtctcagcagctatctggcattaacgccgtgttctattactctacctctatctttgaaaaggctggggtgcagcagcccgtttacgccacaataggaagcggcatcgttaacaccgcttttacagttgtgtccctattcgtcgtcgaacgggctgggcgcagaaccctgcacctgattgggttagctggaatggctggatgcgctatcctgatgacgatagccctggcacttctggaacagctgccatggatgagctatcttagtatagtggccatcttcggcttcgtagctttttttgaagtcgggcctgggccaatcccctggttcatcgtggccgaactgttttctcagggcccccggccagcagccattgccgtggcgggcttttccaactggacgtcaaactttatcgttgggatgtgctttcagtacgttgagcaactgtgcgggccatatgtattcattatctttacagttctattggtgttgttttttatcttcacctacttcaaggtgccagagacgaagggtcggacatttgacgagattgcctctgggttcaggcagggcggggcctctcagtccgataagactcccgaagagctttttcaccctctgggggcagattcacaagtg

SEQ ID NO: 251172 - DNA, 1476 bp, synthetic construct
  misc_feature 1..1476: note = Description of Artificial Sequence: Synthetic coding sequence
  source 1..1476: mol_type = other DNA
atggaacccagcagcaagaagctgacaggaaggctgatgctggctgtgggaggggctgtactgggctctttgcagttcgggtacaatacgggggtaatcaatgctccgcagaaagtcatcgaggaattctataaccaaacatgggtccacagatacggcgagagcatcctgcctaccacacttaccacactgtggagcctgtctgtagctatcttctcagtaggaggaatgatcggatcattttcagttggcctctttgtgaatcgttttggccggaggaatagcatgctgatgatgaatctcctcgcttttgtcagcgcagttctgatgggattcagcaagctgggaaaatcttttgaaatgttgattctgggccgattcattatcggcgtctattgcgggctaaccaccgggttcgttccaatgtatgtcggtgaggtcagccctactgcgcttaggggagccttggggaccctgcaccaactgggtatcgtggttggcatcctgattgcgcaggtattcggcctcgattccatcatgggaaacaaggacctctggcctttgctcctgtctatcatcttcattccagctctgctacagtgtatcgtgctacctttttgccctgagagcccaagatttcttcttatcaacaggaatgaggagaaccgcgctaagtctgtgttgaagaaactgaggggaacagccgatgtgacacatgacctccaagaaatgaaagaggaaagtcgccagatgatgcgtgaaaagaaggtaactattctggagttgttccgtagccctgcttatagacagccaatcctgatcgccgtcgtgctccagctgtctcaacagctttctggcataaacgccgtcttttattactcaacaagcatcttcgaaaaggcaggtgtgcagcaaccagtgtacgcaaccataggcagcggcattgtcaacacagctttcaccgtggtctctcttttcgtcgtggagcgcgcaggacggaggacactgcatcttatcggtctggctggaatggcaggatgcgcgatccttatgactattgcactcgcattgctggagcaacttccatggatgagttacctttccatagtggctatattcggcttcgtggccttctttgaggttggaccaggacccatcccatggtttatcgtcgctgaactttttagccaaggccccagacctgcagctatcgcagttgctggattctccaactggaccagcaattttatcgtcgggatgtgcttccagtatgtggaacaactctgtggaccctacgtctttatcatttttacagtgcttttagttctgttctttatcttcacttatttcaaagtgcccgaaaccaaggggcgtacctttgacgagatagcatccggatttaggcagggcggggctagtcaaagcgataagactccagaagaattgttccaccctcttggagctgattcccaggtc

SEQ ID NO: 251173 - DNA, 1476 bp, synthetic construct
  misc_feature 1..1476: note = Description of Artificial Sequence: Synthetic coding sequence
  source 1..1476: mol_type = other DNA
atggaaccgtctagcaaaaagttaacgggacgcttgatgctggctgtcggcggagcggttttgggaagtcttcagttcggctacaacacgggtgtgatcaatgcgccacaaaaggtcattgaagagttttataatcagacctgggtacatagatatggagaatcaattcttccaacgacgctcacaacgctttggtctctgtctgtggcgattttttccgtcggaggaatgatcggatcctttagcgtgggcttatttgtcaatcggtttggacgcagaaattcaatgctgatgatgaatctgttggcgtttgtgtctgctgttttaatgggttttagcaaattgggtaaatccttcgagatgttgattcttggacgttttatcatcggcgtctactgcggacttacgacaggctttgtgccaatgtatgttggcgaggttagccccacggcccttcggggggcattgggcacgttacaccagttgggcattgttgtaggaatcctgatcgcgcaagtgttcgggcttgattcaatcatgggcaataaggatctgtggcctctccttctatccatcatttttatcccggctttactacagtgcattgtcctgccgttctgcccggaatcaccgcgttttctcttgatcaatcgaaatgaagagaacagagcaaaatcagtgttgaagaaacttcggggaacggcggacgtcacgcatgatcttcaagagatgaaggaagagtcccgtcaaatgatgcgagaaaaaaaagttactatcctcgaactttttcgtagcccagcttatcgtcaacccatattgatcgcggttgttctgcaactatcccaacaattgagtggaattaacgcggtgttttactattcaacatcgatttttgaaaaggcgggcgtgcagcagccagtgtatgccaccataggatcaggaatcgtcaatacagcatttacagtggttagcctcttcgtcgtcgagcgcgcaggccggagaacgcttcatttaattggattggctggaatggcaggttgtgctattttgatgactatcgcattagcattattggagcaactgccttggatgagctatttaagcattgtcgcgattttcggctttgtagctttttttgaggttggcccgggaccaattccgtggttcatagtagcggagttgttttcacagggtccgcggcccgcggcaattgcggttgcgggctttagcaattggacgtcaaattttatagtcggcatgtgcttccagtacgtggagcagttatgcggcccatatgtctttatcattttcaccgtgctgctggtcttattcttcattttcacgtattttaaagtaccggaaacgaaaggacgcacatttgacgagattgcttccggcttccgccagggcggcgcgtcacagagtgacaaaacgcctgaggaattgtttcacccgcttggagcggattcacaagtg

SEQ ID NO: 251174 - DNA, 1476 bp, synthetic construct
  misc_feature 1..1476: note = Description of Artificial Sequence: Synthetic coding sequence
  source 1..1476: mol_type = other DNA
atggaacccagttccaagaagctcacggggagattgatgctggccgtaggcggggccgtactgggcagcttacagttcggctataataccggggtaataaacgccccccagaaagtgatcgaagagttttataatcagacctgggtccacagatatggggagtcgatattaccaactacccttacgacactctggagcttgagtgtggcaatctttagcgtcgggggtatgattggttctttcagtgtaggcttgttcgttaacaggttcggccggcgtaacagcatgctgatgatgaatttgctggcattcgtgtccgcagttttgatgggattcagtaaactagggaagtcctttgagatgctcattttgggcaggttcattatcggagtgtactgtgggcttaccacaggcttcgtccccatgtatgttggagaagttagcccaactgcattacgaggagcgctcgggactctgcaccagctgggaatagtagtgggcatcctgatcgcccaggtttttggactcgattccattatgggtaacaaggacctgtggcctctgctgttgagtatcatcttcattcctgcactgcttcagtgcatcgtgttgcctttctgccctgagtcccctagatttctgctgatcaacagaaacgaagaaaaccgagccaagtccgtcctgaaaaagctgagaggaaccgcggacgtcacacacgatttacaggaaatgaaggaggagagccggcagatgatgcgtgagaagaaggtgacaatcctcgagctgtttcgttccccagcatatcggcagcccattttaattgcggtcgttctgcagctgtctcagcagctgagtgggatcaatgccgtgttttattactcgacatcaatttttgaaaaggctggagtgcagcaaccagtgtacgctacaataggatctggaatagtcaacaccgcgttcacagttgtaagcttgttcgtcgtcgaacgggctggccggaggaccttgcaccttatagggctggcaggcatggctgggtgtgctattttgatgacaatcgcactcgcactgttagagcagctaccgtggatgtcatacctcagcattgttgccatctttgggttcgtcgcttttttcgaggtgggcccaggacctatcccatggtttattgttgcagaactgttttcacagggcccccggccagccgccatagccgttgctggtttctctaattggaccagtaattttatcgtgggtatgtgttttcaatatgtggaacagctgtgtggcccttatgtcttcattatctttaccgtgctcctggttctcttcttcatctttacatactttaaggtccccgaaaccaaaggccgcacattcgatgagatagcatcaggcttccgccagggcggagcttcacagagcgataagactcccgaggaactctttcatcctctgggggccgatagtcaagtc

SEQ ID NO: 251175 - DNA, 1476 bp, synthetic construct
  misc_feature 1..1476: note = Description of Artificial Sequence: Synthetic coding sequence
  source 1..1476: mol_type = other DNA
atggaaccttcttctaaaaaacttacggggagactaatgctggccgttgggggcgccgtgcttggctctctgcagtttggatataatacgggtgtaatcaacgcacctcagaaagttatcgaggaattttacaaccagacgtgggtgcaccggtacggggagtctatccttcctactacattgacgaccctgtggtctctgtctgtcgccatattctcagtaggcggaatgatcggcagcttcagtgtaggcctgttcgtcaatcgctttggtcggaggaactctatgctgatgatgaatctcttggctttcgtgtctgcagtcctgatgggcttttctaagctcggcaaatcctttgaaatgctcatcttgggtagatttatcataggcgtgtattgcggtttaaccaccggcttcgtgccaatgtacgtgggggaagtaagccctacggcactcagaggtgcccttggaactcttcaccaacttgggatcgtcgtaggaattctgatagcccaggtgttcggcttagactccattatgggaaataaagacctgtggcccttgttgctcagcatcatattcatccccgcgctgctgcagtgcatcgtgctgcccttctgtcctgaatccccccggttcctactcatcaatcggaatgaagagaatagggccaaatccgttctgaaaaagcttcggggcaccgcagatgtgacacacgaccttcaagaaatgaaagaagagtcccgccaaatgatgcgcgagaaaaaagtgaccattttagaactcttccgctctcctgcgtacaggcaacctatcctgatcgccgtggtcctgcagctcagccagcaactaagcggcatcaatgcagtgttttattactctacaagtattttcgaaaaggctggagttcagcagccagtgtatgccaccatcggcagcggtatagtgaacaccgcgttcacagtggtgagcctgtttgtcgtagaaagagctggtcgccgcactttgcacttaatcggtctcgccggcatggccggctgtgctatcctcatgactatcgctctggctctcctcgaacaactgccctggatgtcctatctgtctatcgtggcaattttcggattcgtcgctttttttgaggtgggtcctggcccaatcccgtggttcatagtggcagaattattttctcaggggccgcgtcccgccgccatcgcggtggccggcttctccaactggacgtcgaacttcatagtgggaatgtgcttccagtacgtcgagcagctttgcggcccttacgtcttcattattttcaccgtgctgctcgtgttgttctttatcttcacatacttcaaagtacccgaaacaaaagggagaacattcgacgagattgccagcggctttaggcaggggggagcatctcagtccgataagactccggaggagttgttccaccctctcggtgctgatagtcaggtg

SEQ ID NO: 251176 - DNA, 1476 bp, synthetic construct
  misc_feature 1..1476: note = Description of Artificial Sequence: Synthetic coding sequence
  source 1..1476: mol_type = other DNA
atggagccgagctccaagaagctgacaggcagactgatgctggcggtgggcggggcagtgctgggctccctgcagttcggatacaacaccggtgtgatcaacgcaccccagaaggttattgaggaattttacaatcagacctgggtccaccggtatggcgagtccattctgcccactaccctgacaaccttgtggagtctgtcggtcgcaatatttagcgtaggaggaatgatcggatcattttctgttgggctgtttgtcaacagattcggtagacgtaacagtatgctgatgatgaatctgctcgcatttgtctccgcagttttgatgggattttccaagctaggaaagtctttcgagatgctcatcttaggaagatttatcatcggtgtttactgtggcctaactaccggttttgttcccatgtacgtaggagaggtcagcccgacagctctgagaggtgcattgggcactctccaccagctgggcatcgtagtggggattctgattgcacaggtgtttggcctagacagcataatgggcaataaagacttgtggcctctgctattaagtatcattttcataccagctttgctgcagtgtatagtcctgccattttgtccagaaagcccacgcttcctgcttattaatcgtaacgaggaaaaccgcgcaaaaagtgtattgaaaaagctcagagggacagctgacgtgacacacgacttgcaggagatgaaggaggagtctcggcagatgatgcgtgagaaaaaggttactatcctggagctgttccgttcaccagcgtacagacaacccatcctcatcgctgtggtcctccagctcagccaacaactgagtggaattaacgccgtcttttactacagcacatccatttttgaaaaggccggggtgcagcaacccgtgtatgccaccattggaagcgggattgttaatacagcgttcacagtggtctctctgttcgtggtagaacgcgcaggaaggcgaaccttgcacctgattggactcgctggaatggctggctgcgccattctgatgacaattgccctggctttgctggagcagctgccatggatgtcttacctgtcaatcgtcgcaatttttgggttcgtggccttttttgaagttgggcctggaccaattccctggttcatcgtggctgaacttttttctcaaggaccccgtcctgctgctattgcagtcgctggattctcgaactggacaagtaactttatcgttggtatgtgtttccagtatgtcgagcagctgtgcggcccctacgtctttattatttttactgtgctgttagtgcttttctttatctttacttatttcaaagttccagaaaccaagggccgaacctttgatgaaatcgcatccggtttccggcaaggcggcgcgtcgcaaagtgataagaccccagaagagctgttccaccctctcggtgcggactcgcaagtt

SEQ ID NO: 251177 - DNA, 1476 bp, synthetic construct
  misc_feature 1..1476: note = Description of Artificial Sequence: Synthetic coding sequence
  source 1..1476: mol_type = other DNA
atggaaccatccagtaaaaagctgaccggacgcctgatgctcgccgtgggcggggctgtcttgggcagtctgcagttcggctacaacaccggtgtcatcaacgccccgcagaaagtaattgaggaattttacaaccagacttgggttcacagatacggagagagcatccttcccactaccctaactaccctgtggagcttgtccgtcgcaatcttctctgtcggggggatgattgggtctttcagtgtcggactttttgtgaatcggtttggccgcaggaatagcatgctcatgatgaatctgttagccttcgtctccgcggtactgatggggttctccaaactggggaaatcattcgaaatgctcattctgggcaggtttattatcggggtgtactgtggcctgaccacgggtttcgtgccgatgtatgtcggtgaagtgtcccccaccgccctccggggtgccctcggcacactgcaccagttgggaatagtcgtgggaatcctgatagcccaggttttcggacttgactctattatgggcaacaaagatctgtggccattgcttctgagcattatctttattcccgccctccttcagtgtatcgtgctgcctttttgtccagagagtccccgcttccttctgataaatcggaacgaggaaaaccgggccaagagcgtgctaaagaagctccgggggacagctgatgtcacgcacgacttgcaggagatgaaggaagagtcacggcagatgatgagggaaaaaaaggtcacgatccttgaactcttcaggagcccagcctaccggcaaccaattctcatcgccgtcgtcctacagctctcgcaacaactcagcggaatcaacgcagtattctactatagtacgagtatttttgaaaaggctggggtccagcagcccgtgtacgccactatcggctccggaatcgtgaatacggccttcacggtcgtgtccctatttgtcgtggaacgggctggcaggcgcaccctccacctcatcgggttagccggaatggctggttgcgcaatcctgatgactatcgcgttggctctgctcgagcagctgccttggatgtcatatctgtcaatcgtagccatcttcgggtttgtggccttctttgaggtcgggcctggaccaatcccttggttcattgtcgccgagctcttctctcagggaccccgaccggcagccatcgctgtcgccggctttagcaattggactagcaacttcatcgtcgggatgtgctttcagtatgtcgagcaactgtgtggcccctacgtcttcatcattttcactgtgctgttggtgcttttcttcatcttcacatatttcaaggtccctgagacaaaagggagaacttttgatgaaattgcatctggctttcggcaaggcggggcatctcagtccgataaaacccccgaggagctgtttcacccccttggggcggattcacaagtt

SEQ ID NO: 251178 - DNA, 1476 bp, synthetic construct
  misc_feature 1..1476: note = Description of Artificial Sequence: Synthetic coding sequence
  source 1..1476: mol_type = other DNA
atggaacctagcagcaagaaactgactggccggctgatgcttgcagtgggcggagcggtgctggggtctctgcagttcggatacaacaccggagtgataaacgcgccgcagaaggtcatcgaggaattttataaccaaacttgggtacataggtatggcgagtcaattttgcccaccactctgacaactttgtggagtctctccgtggcaatctttagtgttggcgggatgattggaagtttttctgtgggactgtttgtcaaccgatttggtcgcaggaactccatgttgatgatgaacctcctcgcatttgtgagtgccgtactcatggggttctctaaactgggtaagtctttcgaaatgctcatactgggaaggtttatcatcggggtgtactgtgggttgacaacagggtttgtgcctatgtacgttggggaggtttctcctacagcccttagaggagccctggggacattgcaccaactcggtattgttgtcggcattttgatagcccaggtttttgggctggatagtatcatgggcaataaggatttgtggccgcttttgctgagtatcattttcatcccagcactgctgcaatgtatcgtgctcccattctgccccgaatccccgcggttcctcctgataaaccgcaatgaggagaaccgggctaaaagcgtccttaagaaacttagaggcacggccgatgtgactcacgacctgcaagaaatgaaagaggagagtaggcagatgatgcgcgagaagaaggtcaccatactcgagctgtttagatcacctgcctatagacagcctatcctgatcgccgtagtgttgcagctctctcagcagctttctgggattaatgctgtcttctactattctactagcatttttgaaaaggccggagtgcagcagcccgtctacgccacaattgggtcaggcattgtgaatacagcctttacagtagtcagtttgtttgtcgtcgagcgggccggaagacgaactctccatctgataggcctggccggcatggcaggctgcgccattttgatgacaatcgccttggcactgttggagcaactgccatggatgagttatctgtccattgtagccatctttgggtttgtggcattcttcgaggtgggaccaggaccaatcccttggtttattgtagccgaactcttcagccaaggtcccaggcctgctgctatcgctgtcgcaggattcagcaattggacctccaatttcattgtcggcatgtgttttcagtacgttgaacagctttgcgggccctatgtgttcataatctttacagtgttgctggtcttgtttttcatttttacatacttcaaagtgcctgagaccaaggggaggacatttgatgagatagcatcaggcttccgacaaggtggtgcatcccaatctgataagactcccgaggagctctttcaccccctgggggcagattcacaggtg

SEQ ID NO: 251179 - DNA, 1476 bp, synthetic construct
  misc_feature 1..1476: note = Description of Artificial Sequence: Synthetic coding sequence
  source 1..1476: mol_type = other DNA
atggaaccttcatccaaaaagttgacgggtcgccttatgcttgccgtcggtggggcagtgcttgggtcgcttcagtttggttacaacactggagtcattaatgcaccacaaaaagtgatcgaggagttctacaatcagacttgggtgcaccggtacggagaatcaattttgcctaccaccctgactaccctgtggtcgctgtccgtggctatcttctcagtgggcggcatgatcggatccttttcggtcggactttttgttaatcggttcggtaggaggaattctatgctcatgatgaacctgcttgcatttgtatctgcagtcctcatgggtttttcgaagctggggaagagcttcgaaatgttgattctcgggcggtttatcattggagtgtattgcggactgaccaccggtttcgtcccaatgtacgtcggtgaagtgtctcctacggcattgaggggcgcacttggaaccctgcatcagcttggtattgtcgtgggcattctcatcgcccaagtgtttggtttggattctataatgggaaacaaggacctctggcctttgctcctcagcataatctttataccggcactgctgcaatgtattgttctgcccttttgtcctgagagtccacgatttctccttatcaaccggaacgaggaaaacagggctaaatcagtgctgaaaaagctgagaggtaccgccgatgtgacgcatgatttgcaggaaatgaaagaagaaagccggcagatgatgcgcgaaaagaaggtcaccattctggaactgtttcgcagtccggcgtatcgccaaccgatactcattgcagtggtccttcaactgagccagcagcttagcggaattaacgctgtcttttactactccacttcaatctttgaaaaggcgggggtgcagcaaccagtatacgcgactatcggctccggaatcgtgaacactgcctttactgttgtatcgctgttcgtggtggagagagcgggacgtagaactctccatctgattggacttgccggaatggccggctgcgcaattctcatgaccattgcgttggcccttctcgaacagttgccatggatgtcgtacctgtccatagtggcaattttcggatttgttgctttctttgaggtcggaccaggccccataccttggttcatcgtcgcagaactgttctcccaaggtcctagacctgcagcaatcgcagtggccgggttcagcaattggactagtaactttattgtgggcatgtgttttcaatacgtggaacagctttgtgggccgtacgtgtttatcattttcaccgttcttctggtgctctttttcatctttacttacttcaaagtgccagaaaccaagggtagaacctttgacgagattgcatcgggatttcgccaaggaggagcatcacaatcggacaagacccccgaggagcttttccacccccttggtgcagattcacaagtg

SEQ ID NO: 251180 - DNA, 1476 bp, synthetic construct
  misc_feature 1..1476: note = Description of Artificial Sequence: Synthetic coding sequence
  source 1..1476: mol_type = other DNA
atggagccctcctcgaaaaagctcaccggtagacttatgcttgcagttggaggagcagtactgggatcccttcaatttggatacaacaccggtgtgatcaacgcgccccagaaggtgatagaggaattctataatcagacttgggtgcacagatacggagagtcaattttgcctactactctcaccaccctctggtccctgagcgtggccattttctcagtgggtggtatgatcggctcctttagcgttggactgtttgtgaacagatttggacggcgcaatagcatgctgatgatgaacctgcttgcattcgtgtccgcggtgcttatgggtttctcaaaactcggcaagtcgtttgagatgcttattcttggtcgattcataattggggtgtattgcggtttgactactggttttgtcccaatgtacgtcggagaagtcagcccaactgcccttcgtggagcactgggaactctgcatcagctgggtatagtggtgggaatacttatcgcacaagtgtttggcctcgattctattatgggcaataaggacctttggccattgctgctgtcgataatctttatccctgcattgcttcaatgtattgtgttgcctttctgcccggaatcaccaaggtttcttctgatcaataggaacgaggaaaacagagcaaagtccgtgttgaagaaactccgtggcacggcagatgtcacccatgatcttcaggaaatgaaggaagagagtcgacagatgatgcgagaaaagaaggtgactatcctcgagctctttcgatcgcctgcctacaggcagccaattctcattgctgtcgtgcttcagcttagccaacaactttcggggatcaacgccgtcttttactactctaccagcatctttgagaaagcaggtgtgcaacaaccagtgtacgccactataggaagcgggattgtgaatactgcatttaccgtagtttcactgtttgtcgtggaaagagcaggaagaaggacccttcacctcatcgggctggcaggtatggccggctgtgcaatccttatgaccatcgcactcgcactgctggaacaacttccttggatgagctacctgtcgatcgtcgcgatttttggttttgtggccttttttgaagtggggcctgggcccattccatggttcatagtggcagaactgttctcccaggggcctaggccggctgcaattgcggtggccggcttttccaactggacgtcaaactttatcgtaggaatgtgctttcaatacgtcgaacagctctgcggaccgtacgtgttcatcattttcaccgtactccttgtgctgttcttcattttcacttactttaaggtgcctgaaacgaaaggccggaccttcgacgagatcgcgtccgggttccggcaaggcggagccagccagtcagacaagacccctgaagaactgttccatccactcggagcagattcgcaggtg

SEQ ID NO: 251181 - DNA, 1476 bp, synthetic construct
  misc_feature 1..1476: note = Description of Artificial Sequence: Synthetic coding sequence
  source 1..1476: mol_type = other DNA
atggaaccgagcagcaagaagctgaccggcaggttgatgctggcggttgggggtgccgtgttaggttcgttacagtttgggtacaacaccggcgtgatcaacgctcctcagaaagtaatagaagaattctataaccagacgtgggttcacaggtacggggagtcaatcctgccaacaaccctgactacactgtggagcttgagtgttgccattttttctgtcggcgggatgataggctccttctctgtgggccttttcgtcaatcgcttcggtaggcgaaactctatgttaatgatgaacttgcttgccttcgtgagtgctgtgttgatgggcttctccaagctcgggaaatcctttgagatgcttatcctgggacgctttataattggggtctactgcgggctgacaacaggctttgtgcctatgtacgtaggcgaagtcagccccacagctctgcgtggcgccttggggaccttgcaccagctcggcattgtggttggtattctcatcgctcaggtgtttggattggatagcatcatgggaaacaaggacctatggccactgttgctgtcaattatcttcattcctgcactactccaatgtatagtgttgcctttctgccctgaaagccctaggttcctgctgattaatagaaatgaggagaacagagcgaaaagtgtgttgaagaaactgcgcgggacggctgacgtaactcacgatttacaagagatgaaggaggaaagcaggcagatgatgcgggaaaaaaaagtgacaatacttgagctctttcgctcccctgcctataggcaaccgattctgatcgccgtagtgctgcaactttcccagcagctgagcggcataaatgctgtcttttactatagtacgtcaatctttgagaaggctggcgtgcagcaacccgtgtacgctactataggtagtggcatagtgaacacggctttcaccgtcgtatccttgttcgtcgtggagcgcgctggccggagaacactgcatctgatcgggctcgccggaatggcgggctgtgccatcctgatgaccatcgcactggccttgttggaacagctgccatggatgagctatttgtctatcgtggcaatctttggattcgttgcgtttttcgaagtcgggcccggaccaatcccgtggtttattgtggcggagttattttcgcaagggcctcgacccgcagctattgccgtggccggcttctccaattggaccagtaactttatcgtcgggatgtgctttcagtatgtagaacagctctgcggaccttacgtcttcattatcttcacagtgttgcttgtcctgttctttatttttacatatttcaaggtcccggaaaccaaaggcagaactttcgacgagatcgcaagcggctttaggcagggcggagcctctcagtctgacaaaaccccagaagagctgttccatccactcggcgcagacagccaggtc

SEQ ID NO: 251182 - DNA, 1476 bp, synthetic construct
  misc_feature 1..1476: note = Description of Artificial Sequence: Synthetic coding sequence
  source 1..1476: mol_type = other DNA
atggagccatcaagtaaaaagttgacaggtcgcttgatgctggcagtggggggtgccgtgctgggcagtctgcagtttggttacaatacaggagtcataaacgcccctcagaaggttatcgaagagttctacaaccagacatgggtccatcggtatggggaaagtatactgcccacgacacttaccacactctggtccttatctgtggcgatcttctcagtcggcggcatgataggcagttttagcgtggggctctttgtgaatcggttcgggcggcggaacagcatgctcatgatgaatctgctggcctttgtgtctgctgtgctgatgggattctcaaagctgggaaaatccttcgaaatgctgattttagggaggttcataatcggagtatactgtggcctgacgacaggattcgtcccgatgtacgtgggcgaggtctctcctactgcgctccgaggggctttgggaacactacatcagctgggaatcgtcgtcgggattctgattgcacaagtgttcgggctcgattctattatgggaaacaaagatctgtggccactgctgctgtccattatcttcatccccgcgctacttcagtgcattgtgcttcccttctgtccagaatcccctcggttcctgctcatcaaccgcaacgaggagaatcgcgctaaaagcgttctcaaaaagctccgggggacagcagatgtgacgcatgacctgcaagaaatgaaggaggaatcgcgtcagatgatgcgagagaaaaaagtaaccatcttggaactgtttcggagccctgcttatcgccaaccaatactcattgccgtggtactgcagctgagccaacagctttctggaatcaacgcggtgttttattactccacctctatctttgagaaggccggggtccagcaacccgtgtatgcgaccattggtagtggcattgttaataccgcctttacagttgtttctcttttcgttgtggagagagccggtagacggaccctgcacctaatcggcctggcagggatggctgggtgcgcaatccttatgaccatcgctttggctctattagagcaactgccatggatgagttatctttctattgttgcaattttcggtttcgtggctttttttgaggtcggcccgggacctatcccctggtttattgtggctgaactattctctcaggggcctagaccagccgcgatcgctgttgccggattttcgaattggacctccaacttcatcgtcgggatgtgctttcagtacgttgagcagctttgcggaccttatgtctttataatatttaccgttctcctggtgcttttctttatttttacttacttcaaggtgccagaaaccaaaggaaggacttttgatgagatcgcttcaggttttaggcagggtggcgcctcccagagcgacaaaactccagaagaattgtttcacccacttggggctgatagtcaggta

SEQ ID NO: 251183 - DNA, 1476 bp, synthetic construct
  misc_feature 1..1476: note = Description of Artificial Sequence: Synthetic coding sequence
  source 1..1476: mol_type = other DNA
atggagccttccagtaagaaactcactgggcgactgatgctggcagtaggtggcgcggtgttggggtccctccagttcggatacaataccggggtcattaatgccccccagaaagtgattgaggagttctataaccaaacatgggtccatcgatacggcgagtccatcttgcccaccacactgacaacactttggtcccttagcgtggcaatattttctgtgggtggaatgatcggttcctttagcgtgggactttttgtcaataggttcggaaggcggaactccatgctgatgatgaacctgcttgccttcgtcagcgccgtcctgatgggatttagcaagctgggcaagtcctttgagatgttgatactggggcgatttatcattggcgtttattgcggactcacaacgggcttcgtgcccatgtatgtcggcgaggtgtcaccaacggccttgagaggcgctctgggtaccctgcatcagctgggtatagtggtaggcatcttgattgcacaggttttcggtcttgactctatcatgggcaacaaagacctgtggccactgttgctgagcatcatttttatccccgcactgctgcagtgtatagtcttgcccttctgtccagaatctccaaggttcctgctgataaatcggaacgaggagaaccgagcaaaaagtgtgctcaaaaaactgcgaggtactgcagacgtgacccatgacctgcaagagatgaaggaggaatcaaggcagatgatgagggaaaagaaggtgacgatcctggagctgttcagaagccctgcttaccgccagccaatccttattgcggtggtgctccagctgagccagcagctctcaggcattaacgccgtgttttactacagcacctctatttttgaaaaggccggggtgcagcaacctgtctatgccacaatcggcagtggtatagtgaacaccgccttcacagtcgtgtccttgtttgtggtggagagagccggtcggaggaccctgcacttgatcgggcttgctggtatggcaggctgcgccatccttatgacaatcgctcttgcacttctggagcagttgccttggatgagttaccttagcatcgtggcaatcttcggattcgtagcattctttgaagttggcccaggacccattccgtggttcatcgtggctgaactgttctcccaagggccgcgccctgcagccatcgccgttgccggcttctcaaattggacatcaaacttcatcgtgggtatgtgctttcagtacgtcgagcagctctgcgggccgtacgtctttatcatcttcactgtgctcctggtcctgttttttatctttacctattttaaggtacctgaaacaaaagggcgaacattcgatgagatcgcctctggctttcgccaaggcggggcaagccagagtgacaaaacgcccgaggaactgttccaccccctgggagctgatagtcaggtg

SEQ ID NO: 251184 - DNA, 1476 bp, synthetic construct
  misc_feature 1..1476: note = Description of Artificial Sequence: Synthetic coding sequence
  source 1..1476: mol_type = other DNA
atggaaccgtcgtcgaaaaaactaacgggtcgtctaatgctagcggttggtggtgcggtactaggttcgttacaatttggttataatacgggtgtaataaatgcgccgcaaaaagttatagaagaattttataatcaaacgtgggttcatcgttatggtgaatcgatattaccgacgacgctaacgacgctatggtcgctatcggtagcgatattttcggtaggtggtatgataggttcgttttcggttggtttatttgtaaatcgttttggtcgacgaaattcgatgctaatgatgaatttactagcgtttgtatcggcggttttaatgggtttttcgaaactaggtaaatcgtttgaaatgctaatattaggtcgatttataataggtgtatattgtggtttaacgacgggttttgttccgatgtatgttggtgaagtttcgccgacggcgttacgaggtgcgctaggtacgttacatcaactaggtatagtagtaggtatattaatagcgcaagtttttggtttagattcgataatgggtaataaagatctatggccgttactattatcgataatatttataccggcgttattacaatgtatagtactaccgttttgtccggaatcgccgcgttttctattaataaatcgaaatgaagaaaatcgagcgaaatcggtactaaaaaaattacgtggtacggcggatgttacgcatgatttacaagaaatgaaagaagaatcgcgtcaaatgatgcgtgaaaaaaaagtaacgatactagaactatttcgttcgccggcgtatcgtcaaccgatattaatagcggtagtattacaactatcgcaacaactatcgggtataaatgcggtattttattattcgacgtcgatatttgaaaaagcgggtgttcaacaaccggtttatgcgacgataggttcgggtatagtaaatacggcgtttacggtagtttcgttatttgttgtagaacgtgcgggtcgtcgaacgctacatctaataggtttagcgggtatggcgggttgtgcgatattaatgacgatagcgttagcgttactagaacaattaccgtggatgtcgtatctatcgatagtagcgatatttggttttgttgcgttttttgaagtaggtccgggtccgataccgtggtttatagtagcggaattattttcgcaaggtccgcgaccggcggcgatagcggttgcgggtttttcgaattggacgtcgaattttatagttggtatgtgttttcaatatgttgaacaactatgtggtccgtatgtttttataatatttacggttctattagttttattttttatatttacgtattttaaagtaccggaaacgaaaggtcgaacgtttgatgaaatagcgtcgggttttcgtcaaggtggtgcgtcgcaatcggataaaacgccggaagaactatttcatccgctaggtgcggattcgcaagta

SEQ ID NO: 251185 - DNA, 1476 bp, synthetic construct
  misc_feature 1..1476: note = Description of Artificial Sequence: Synthetic coding sequence
  source 1..1476: mol_type = other DNA
atggaaccgtcctccaagaagctcaccggaaggctgatgcttgcggtcggaggtgctgtgctgggatccctccagttcggatacaacactggggtgatcaatgccccacagaaagttatcgaagaattctacaatcagacctgggtccaccgctacggagaatcgatactgccaaccactttgactaccctctggagtctgagcgtcgccatcttctctgtgggagggatgatcggatcgttctcggtcggactgttcgttaacagattcggcaggagaaactcgatgctgatgatgaatctgctcgcatttgtgtcggccgtgctcatgggattcagcaagctgggaaagagcttcgagatgctcatcctgggacggttcattatcggggtctactgcggcttgaccacggggtttgtcccgatgtacgtgggcgaagtctcgcctactgcccttcggggagccttgggaactctgcatcaactgggcatcgtggtggggatcctcatcgctcaggtgttcggtctggactcgatcatgggcaataaggacctgtggccactgctgctctcaatcatcttcatccccgctctgctgcagtgcattgtcctgccgttctgtcctgaaagcccgagattcttgcttattaaccgcaacgaggagaaccgagccaaaagcgtgctgaagaaactgagaggtactgccgacgtgactcacgatttgcaagagatgaaagaggagagccgccaaatgatgcgggaaaagaaggtcacgatcctcgaactgtttcgctctccagcctaccggcaaccaatccttatcgccgtggtgctgcagctgtcacaacaactgtccggcattaacgcagtgttctattactcgacctccatcttcgagaaggcgggagtgcagcaacccgtctatgcaaccattggaagcggcatcgtgaatacggccttcaccgttgtctcactcttcgtcgtagaaagggcgggccgccggactctccatttgattggcctcgctggaatggccggttgcgcgatcctgatgactatcgccctggcgctgctcgaacagcttccgtggatgtcatacctcagcatcgtcgcaatcttcggattcgtggctttcttcgaagtgggccctggaccgatcccttggttcatcgtggccgagctgttctcccagggtccacgcccggcggcaatcgcagtggcgggattctccaactggacctccaactttattgtgggaatgtgtttccagtacgtggaacagctctgcggaccctacgtgttcatcatatttaccgtgctcctggtgcttttctttatctttacctactttaaggtgccggagactaaagggcggacctttgacgagatcgcgtcaggctttcgccaggggggtgcatcgcagtccgataagaccccggaggaactttttcacccgttgggagctgattcacaagtg

SEQ ID NO: 251186 - DNA, 1476 bp, synthetic construct
  misc_feature 1..1476: note = Description of Artificial Sequence: Synthetic coding sequence
  source 1..1476: mol_type = other DNA
atggaaccttcgtctaagaagctgaccgggaggcttatgcttgccgtgggaggtgcagtgctgggtagcctccaatttggatacaatacgggggtgattaacgcaccgcagaaggtgatcgaggaattctataaccaaacgtgggtgcatagatacggcgaatcaattctgcccaccacgctgaccaccctctggtccctttcagtggccattttcagcgtgggcggaatgatcggaagtttctcggtcggtctgttcgtcaacagatttgggcgccggaacagcatgcttatgatgaatcttctcgccttcgtgtccgccgtgcttatgggtttttcaaagctcggaaagagcttcgagatgctgatcctcggtcgatttatcatcggagtctactgcggcctcacgactgggtttgtcccaatgtacgtgggcgaagtctcacctaccgcgctcagaggagcacttggcacccttcatcagctcggcatagtggtcggaattcttattgctcaagtgtttgggcttgacagcattatgggtaataaggacctttggccattgttgcttagcatcattttcattcccgcactcctccagtgcatagtcctccctttttgtccagagtcgccacgcttccttttgattaacaggaatgaagaaaacagggctaagagcgtcctgaagaagctgagaggtaccgcagacgtcacccatgatctgcaggaaatgaaggaggaaagtcggcagatgatgcgcgagaaaaaggtgactatcttggaactttttaggtcgccagcttacagacaaccaatccttatcgctgtggtgcttcagctctcccaacagctgagcgggataaatgcagtgttttactactccacctccatattcgagaaagcaggtgtgcaacagcccgtttacgcaaccatcggttcgggaatcgttaatactgcctttaccgtggtgtcactgttcgtggtggagagggcaggtcgccggacccttcaccttatagggctggcaggaatggcagggtgcgcaattcttatgaccattgctctggctctccttgaacagttgccctggatgtcctacctgtcgattgtcgcaatcttcggatttgtggccttcttcgaggtgggtcctggtccaattccttggtttatcgttgcagaactcttctcacagggccctagaccagccgctattgccgtggccggattttccaactggactagcaactttatagtcgggatgtgttttcaatacgtggaacaactgtgtggaccatacgtgttcattatctttaccgtgctgctggtgctgttctttatctttacttactttaaagtgccagagacgaagggaagaacgttcgatgaaattgcaagcggcttccggcagggaggtgcgtcacaatccgataaaacccccgaggaactcttccaccctcttggagcagatagccaggtg

SEQ ID NO: 251187 - DNA, 1476 bp, synthetic construct
  misc_feature 1..1476: note = Description of Artificial Sequence: Synthetic coding sequence
  source 1..1476: mol_type = other DNA
atggaaccctcgtcgaagaagctgacgggaaggctgatgcttgcggtgggtggagcagtgctcggcagcctccagttcggatacaataccggagtgattaatgcgccgcagaaggtcatcgaggagttttacaaccaaacttgggtccaccgctacggcgagagcatcctgccaactaccctcaccactctgtggtcactgagcgtcgctatcttctcagtcggaggaatgatcggctccttttccgtggggttgtttgtgaatagatttggcagacgcaattccatgctcatgatgaacctgctggcattcgtgtcagctgtgctgatgggattttcaaagctcggcaagtcgtttgagatgttgatcctgggccggttcattatcggcgtgtactgtgggctgactaccggcttcgtcccaatgtacgtcggcgaagtgtcaccaaccgcgctccgaggagcactgggcactttgcaccaactgggaattgtggtgggaatcctcattgcgcaggtctttggactggattcgatcatgggaaacaaggacctgtggccgttgctgctctccatcatcttcatccctgccctgctgcaatgtatcgtcctcccgttctgtccggagtccccgcggtttctcctgatcaacagaaacgaagaaaacagagcaaaatctgtgctcaaaaaactccgcggaaccgccgacgtcacccacgacttgcaggagatgaaggaggaatcgcggcaaatgatgagagaaaagaaggtgaccatcctggaacttttcaggagccctgcctaccgccagccgatcctgatcgccgtcgtgcttcagctgtcgcagcagctctccgggatcaacgcagtgttttactactcgacttcgatcttcgagaaggccggagtgcaacagccggtctacgcaaccatcggatccggaatcgtgaacactgcgttcaccgtggtgtccctgttcgtggtcgagagagcggggcgcagaaccttgcacctgatcgggctggcgggaatggctggatgtgccatcctgatgacgatcgccctggcactgctcgaacaactgccatggatgtcatacttgtcgatcgtggctatcttcggattcgtcgccttcttcgaggtggggcccggacccataccatggtttatcgtggcagagctgttcagccagggccccagacccgcagccatcgccgtggcgggattctcgaactggacttcaaatttcattgtgggcatgtgctttcagtacgtcgaacagctgtgcgggccttatgtgttcatcatctttactgtgctcctggtgctctttttcatcttcacgtacttcaaggtccctgagactaaaggaaggacctttgatgagatcgcctctggatttcgacagggaggcgcatcccagtccgacaagactccggaagaactgttccacccactgggagctgactcgcaagtg

SEQ ID NO: 251188 - DNA, 1476 bp, synthetic construct
  misc_feature 1..1476: note = Description of Artificial Sequence: Synthetic coding sequence
  source 1..1476: mol_type = other DNA
atggagccatcctcgaaaaagctgactggacggctgatgcttgcagttggtggtgcggtgctgggatcccttcagttcggctacaacaccggagtgataaatgcacctcagaaggttattgaagaattctacaatcagacttgggtgcacaggtacggtgagtcgatcctgcccaccaccttgaccaccctttggtcgctctccgtcgccattttctcggtgggaggaatgatcgggtcattctccgttggccttttcgtcaacagatttgggcgtagaaattcaatgctgatgatgaatctccttgctttcgtgagcgctgtgctgatgggattcagcaaattgggaaaatcattcgaaatgttgatacttggacgctttatcattggggtgtactgcgggctgaccaccgggtttgtaccaatgtatgttggcgaggtgtcgccaaccgcattgcgcggtgcactgggaaccctgcatcagctgggaatcgtcgtcggtatcctcatagcacaggtctttggactggactcgattatgggcaacaaggatctctggccccttcttctgtcgattatctttatacccgccctgcttcaatgtatagtgttgcctttctgtccagagtccccacgatttctgctgattaacagaaacgaggaaaaccgtgcaaagtcggtgctgaagaagctgcgcggaactgccgacgtgactcatgacctgcaggaaatgaaggaagaatcgcggcaaatgatgcgtgaaaagaaggtgaccatccttgagttgtttcgaagcccagcataccgccagcccatcctcattgcagtcgtgttgcaactttcgcaacaactgtcgggaatcaatgccgtgttctactactcgaccagcatctttgagaaagcgggagtgcaacagcccgtctacgccacgattggatcgggtattgtgaacaccgcatttactgtggtgtcactctttgtggtggaacgagcgggtagacgcaccctccatcttattggactggcaggtatggcaggttgcgcaattctgatgaccatcgcactggctcttctggagcagctgccttggatgtcatacctctccatcgtcgcaatattcggttttgttgctttctttgaagtcggaccagggcctatcccgtggtttatagtggcggaactgttcagccagggtccaagaccggcagccattgcagtggctggtttcagcaattggacttccaactttatcgtgggcatgtgtttccaatacgtggaacagttgtgcggtccatacgtgttcatcatattcaccgtgctcctggtccttttcttcatcttcacgtactttaaggtgcccgaaactaaggggagaacctttgatgaaatcgcatcgggctttcggcaaggaggtgcatcccaatcggacaagaccccagaagagctgtttcaccctctcggcgcggattcccaggtg

SEQ ID NO: 251189 - DNA, 1476 bp, synthetic construct
  misc_feature 1..1476: note = Description of Artificial Sequence: Synthetic coding sequence
  source 1..1476: mol_type = other DNA
atggaacctagctcaaagaagctgactggtaggcttatgctggcagtgggcggtgccgtgcttggatcgctgcagtttggatacaatacgggcgtcataaacgcaccccagaaggtgatcgaggaattctacaaccagacctgggtccatcgatacggggaatcaatcctgccgactacgttgacgactctgtggtcattgtctgttgctatcttttcggtgggtgggatgattggatccttttcggtcggactgtttgtcaacaggtttggtcggcggaactcaatgcttatgatgaatcttctggcgtttgtgtcggccgtcctgatgggattttccaaacttggaaagtcgtttgaaatgcttatcctgggacgcttcataattggagtgtactgtggcctcactactggatttgttcccatgtacgtgggcgaagtctcgcctaccgcacttcgaggcgccctgggaactctccaccaactggggatcgtggtcggaatcctgatcgctcaggtgtttggtcttgacagcattatggggaacaaggatttgtggcctctgctgctctcaattatctttatccctgccctccttcaatgtattgtccttcccttttgtcccgaatcaccacgttttctgctcattaatcgcaacgaggagaaccgggcgaaatccgtcctcaagaaacttagaggaactgcagacgtgacccacgatcttcaggagatgaaggaggaatcaaggcagatgatgcgagaaaagaaggtgacgatcctggaactttttcgttcgccagcgtaccggcagccaatccttatagccgtggtgctgcaattgtcacagcagctttcagggatcaatgccgtgttttactacagcactagcattttcgaaaaggccggagtgcagcaaccagtgtacgccacgataggatcgggtatcgtcaacactgcatttacggtagtgtcgctcttcgtggtggaaagagcaggccggagaactcttcatctgataggactggcaggcatggcaggttgtgcaatcctcatgaccattgctttggctctgcttgaacaattgccttggatgtcatatctctcaattgtcgcaattttcggattcgtggccttttttgaagtgggcccggggcctataccttggttcattgtcgctgaacttttttcacaaggaccccgtccagccgcaatcgcggtggcagggttctcgaactggaccagcaacttcattgtggggatgtgttttcagtacgtggagcaactttgtggtccctacgtgttcattatcttcactgtgctcctggtgctgttctttatctttacctacttcaaggtgcctgagactaaaggacgtacttttgacgagattgcttcgggttttcggcaaggaggagcaagccaatccgataaaaccccagaggagctgttccatccactgggcgcagattcgcaagtt

SEQ ID NO: 251190 - DNA, 1476 bp, synthetic construct
  misc_feature 1..1476: note = Description of Artificial Sequence: Synthetic coding sequence
  source 1..1476: mol_type = other DNA
atggagccaagttctaaaaaactcacgggtcgcctgatgctggctgtaggaggagctgtgctggggtccctgcaattcgggtataacacaggtgttataaatgcaccccagaaggtgattgaagagttctacaaccaaacctgggtgcacaggtacggagaaagcattttgcctaccactctgacaaccctgtggtccctgtccgtcgcgattttcagtgttggtggtatgatcggctctttcagcgtcggtctgttcgttaacagattcggtagacgcaatagcatgctgatgatgaacctgcttgcgtttgtctcagccgtcctcatggggttcagcaagcttggtaaaagcttcgagatgctaatccttgggagattcatcataggcgtatattgtgggctcactacaggttttgtgccaatgtatgtgggggaagtgtctcccactgcactgcgtggggccctggggacactccatcaactaggcatcgttgtgggcattctcattgcccaggtcttcggactggactccattatggggaacaaagacttgtggcctctccttctgtctattattttcatccccgcactgctacagtgtatcgtgttacctttctgccccgagagtccacggtttttgttgattaatagaaatgaggagaacagagccaagagtgtgctcaaaaaactgcgcggcactgccgacgtgacacacgatctgcaggaaatgaaagaagaatctaggcaaatgatgcgggaaaaaaaggtgacgatcctagaattgtttcgttccccggcctacagacagccgatccttatcgctgtcgttctgcagctctctcagcagctatcaggaataaacgctgtgttttactattccacctcaatcttcgaaaaggcaggagtacagcagccagtttatgccactattgggagcggaattgttaacacagcattcactgtcgtatctctgtttgtggtggaaagggctgggcggcgcaccttgcacctcatcgggctggcaggaatggcggggtgtgccatcctcatgaccattgcgctcgctttgttggagcaactcccgtggatgagctatttgagcatcgttgctatatttggcttcgtggctttcttcgaggttgggccgggtcccatcccctggttcatcgtggcagagctgttttcacagggccctaggcccgcagccattgcagttgcgggcttcagcaattggacaagcaactttattgtcggaatgtgtttccaatatgtggaacagttgtgcggcccgtacgtgtttatcatattcacggtcttgctcgttctcttctttattttcacatactttaaggtgcctgaaacaaaaggccggacatttgacgaaatcgcatctggattccgccagggaggtgcgtcccagtcggacaagacgcccgaagagttgtttcatcccctcggcgcggatagtcaggtt

SEQ ID NO: 251191 - DNA, 1476 bp, synthetic construct
  misc_feature 1..1476: note = Description of Artificial Sequence: Synthetic coding sequence
  source 1..1476: mol_type = other DNA
atggagccgtcctccaagaaacttactggacgtctgatgcttgcagtgggcggggccgtgctgggctcactgcagttcggatacaataccggagttatcaacgccccgcaaaaggtcatcgaagagttctacaatcaaacttgggtccaccgctatggagaatccatcctgccaacgactctgacgactctgtggtcactgtctgttgcgatcttcagcgtgggaggcatgatcggttccttttccgtgggtctgtttgtgaaccggttcgggcgccggaattcgatgctgatgatgaacttgctcgcgtttgtgagcgcggtcctcatgggcttttcaaaactggggaaatcatttgaaatgttgatccttggtcggttcatcatcggagtctactgcggattgaccactggttttgtccctatgtatgtcggggaggtgagccccactgccctgcgcggtgcacttggaactctccaccagttgggaatcgtcgtggggatcctgattgcccaggtgttcggactcgactcaattatgggaaacaaagacctgtggccgctcctcctgtctatcatcttcattccagccctcctgcagtgcattgtgttgccattctgccccgaatcacctagattcctgctcatcaacagaaacgaggaaaaccgcgcgaagtcggtgctcaagaagttgagagggaccgctgacgtcactcacgaccttcaggagatgaaggaagaatcgcggcagatgatgcgcgagaagaaagtgaccatactggagcttttcaggagccctgcgtacaggcagccaatccttatcgccgtcgtcctccagctctcgcagcagctgagtggaatcaatgcagtgttttactactctacctcaatcttcgaaaaggcgggggttcagcaacctgtgtacgctacgatcggatcagggatcgtgaacaccgcgtttaccgtggtgtccctcttcgtggtggaaagagcaggacgccggactctccacctcatcggactcgcggggatggcggggtgtgccatcctcatgaccatcgcactggccctcctggagcaactgccctggatgtcgtacctgtccatcgtggccatcttcggttttgtggctttctttgaagtgggcccaggcccgatcccatggttcattgtcgccgagctgttctcccagggaccccggcctgccgccatcgccgtggcggggttttcaaactggacttcgaatttcatagtcggaatgtgcttccaatacgtggaacagctgtgcggaccctacgttttcatcattttcacggtgctgcttgtcctgttctttatcttcacgtacttcaaggtcccggagactaaaggccgcacgttcgacgagattgcttcagggttccgccaaggaggagctagccagtccgataagaccccggaagaactcttccacccgctcggggccgactcccaagtc

SEQ ID NO: 251192 - DNA, 1476 bp, synthetic construct
  misc_feature 1..1476: note = Description of Artificial Sequence: Synthetic coding sequence
  source 1..1476: mol_type = other DNA
atggagcccagctctaaaaagttgaccggtcggcttatgctcgctgtggggggcgctgttctgggatctttgcagtttggctacaacacaggggtcataaacgcacctcagaaagtgatagaggagttttacaaccaaacctgggttcaccgctatggtgaaagtattctgcctactacactcacgaccctctggtctctgtcagtcgctattttttctgtcggcgggatgattggttctttctctgtcggccttttcgtcaaccggttcggcagaagaaattctatgctgatgatgaatctgcttgcctttgtgagcgctgtgctcatgggtttcagcaagctgggcaagagtttcgagatgctcatccttggacggttcatcatcggagtgtattgcggcctgactacagggtttgtgcctatgtacgtgggcgaagtgtcccctactgccctgcgcggggctctcggaaccctgcatcagctgggaattgtagttggcattctcatcgcgcaggtcttcgggcttgattccatcatgggcaacaaagatctgtggccacttctgttgagtatcatattcatccccgcccttttgcagtgtattgttctgcccttctgtcccgagtccccaagattcttgctgatcaatagaaatgaggagaaccgggctaagagcgtactgaagaagctccggggcaccgctgacgtcacacacgaccttcaggaaatgaaagaggagagccgacagatgatgcgggagaagaaagtgactatccttgaactgttcagatctcccgcatacagacaacccatcctcattgctgtggtgcttcagctgagtcagcagctgagtggaattaacgctgtgttttactatagcacctccatcttcgaaaaagctggcgttcagcagccagtttatgctacgatcggcagtggcatagtcaacactgcatttacagtagtgtctctcttcgtggttgaaagagccggacgacggactttgcacctgatcggactggctggaatggccggctgtgcaatattgatgacaatcgctctggccctgctggaacagctgccttggatgagctatctttccatcgtggcaatttttgggtttgttgcctttttcgaggtgggtcctgggccaattccatggttcatcgtcgccgagctgttcagccagggaccccggccggctgcgattgctgtggctgggttctccaactggacgtcaaatttcatcgtgggaatgtgctttcagtacgtggagcagctctgtggcccctacgtttttataatatttaccgtcctgctcgtcttgtttttcatcttcacgtatttcaaagtgcctgagaccaaagggcgaacttttgatgagatcgctagcgggtttcggcagggcggcgcgtcccagtccgataagactcccgaagaactcttccaccctttgggggctgactcacaggtc

SEQ ID NO: 251193 - DNA, 1476 bp, synthetic construct
  misc_feature 1..1476: note = Description of Artificial Sequence: Synthetic coding sequence
  source 1..1476: mol_type = other DNA
atggagccatccagtaagaaactaacaggccgcctcatgttggcagtagggggagccgttctcggctcattgcaatttggctataatacaggcgtaatcaatgccccccagaaggtaatcgaggagttttataatcagacttgggtacaccgctatggtgaatccatcctccccaccactctgaccacactgtggtccttgtcggtcgctatattctcggtcggggggatgattggaagcttcagtgtgggcctgtttgtcaaccgattcggaagacgcaatagcatgctgatgatgaatttactcgcattcgtgtcggcggtgttaatgggattcagtaaactgggcaagtcctttgagatgctaatcttgggcaggttcatcataggggtttactgtggactgacgacaggattcgtgcccatgtacgtgggggaagtatcacccacggccttgcgcggggccctgggcaccctccatcaactcgggattgtggtcggcattctcatcgcgcaggtgttcggtctcgactcgattatgggtaacaaagatctttggccgctgttgctgagcataattttcataccagccctccttcaatgcattgttctccccttttgcccagaatcaccaagatttctgttgataaatcgtaacgaggagaacagagccaaatcagttcttaagaaactgagggggactgccgacgtaacgcacgacctgcaggagatgaaagaggagagtcgccagatgatgagggagaagaaagtgacaattttggagctattccgcagccccgcttacagacaacctattcttattgctgtcgtgctgcagttgtctcagcagctttctggaataaatgcagtcttttactacagcacatcaatcttcgagaaggccggtgtgcagcagcccgtctacgctaccattgggtcgggcattgttaacacagcatttaccgtggtgtccttgtttgtggtggagcgcgcagggaggcggactctgcacttgattggacttgccggcatggccggctgtgctattctaatgaccatcgctctcgctcttctggaacaactgccatggatgagctatttgagtatcgtggcgatttttgggtttgttgccttttttgaagtggggcctggccctattccatggtttattgtggccgaactgttcagccaaggtcccaggccggctgccatcgcggtagccggcttctctaattggacatctaacttcatcgtgggtatgtgcttccaatatgttgaacaactctgcgggccttatgtttttattatcttcacagttctgctggtgttattcttcattttcacatatttcaaggttcccgagacgaagggacggacgtttgacgagattgcgtctggtttccgacagggaggagctagccagtcagataagactccggaagagttgtttcaccccctgggcgcagactcccaggta

SEQ ID NO: 251194 - DNA, 1476 bp, synthetic construct
  misc_feature 1..1476: note = Description of Artificial Sequence: Synthetic coding sequence
  source 1..1476: mol_type = other DNA
atggagccttcgagcaaaaagctcactggcagacttatgcttgctgtgggaggagcagtccttggttcgttgcagtttggttataacaccggtgtgataaatgcaccacagaaggtgatcgaagaattctataaccagacgtgggttcatcgttacggagaatccatcctgccaaccaccctgaccactctgtggtcgctctctgtggccattttctcagtggggggaatgatcggttccttctcggtgggcctgtttgtcaacagattcgggcggcgtaattcaatgctgatgatgaatctgctcgcatttgtctcggccgtgctgatgggattctccaaacttggtaaatccttcgagatgctgatactcggacgattcatcattggagtctactgcggacttactaccgggtttgttcccatgtacgtgggggaggtgagccctaccgcactgcgcggtgcactggggacccttcaccaattgggtatcgtcgtcggcattctgatcgcccaagtgttcggtcttgacagcatcatgggcaacaaggacctttggcctctgctgctcagcatcattttcatccctgcgcttcttcagtgcatcgtccttcctttttgtcccgagtcgcctcggttcctcctcatcaaccggaacgaagagaacagagccaagtccgtgctgaagaagctccgcggaaccgccgatgtgactcatgatcttcaagagatgaaagaagaatcgcgccagatgatgcgggagaagaaggtcactattctcgaactgtttagatcacccgcttaccgacagccaattctcattgctgtggtcttgcaactgtcccaacaactttccgggattaacgcagtgttttactacagcactagcatctttgaaaaggctggcgtccaacaaccagtttacgccactattggctcgggaattgttaataccgcattcactgtggtttcgctttttgtggtggagcgagcgggcagacgcactttgcatctgatcggactggcagggatggcagggtgtgctatcctcatgacgatcgcgctggcattgttggagcagcttccttggatgtcctacttgagcattgtcgccatttttggctttgtggcatttttcgaggtcgggcctggcccaattccgtggttcatagtggctgaacttttttcacaaggccctcggcctgccgcaatcgcggtggcaggttttagcaattggaccagcaatttcatcgtgggaatgtgttttcagtacgtggaacaactctgtggtccatacgtgtttatcattttcactgtgttgctggtgctgttctttatcttcacgtacttcaaggtgccggagactaaaggtagaacctttgacgaaattgcgtccggttttagacaggggggcgcctctcagtcagataaaaccccagaagaactttttcacccgttgggtgccgattcgcaagtg

SEQ ID NO: 251195 - DNA, 1476 bp, synthetic construct
  misc_feature 1..1476: note = Description of Artificial Sequence: Synthetic coding sequence
  source 1..1476: mol_type = other DNA
atggagccgtcatctaagaagctcaccggtcgcctgatgctcgctgtcggaggagccgtgctggggagcctgcagttcggatacaacaccggtgtcatcaacgcgccgcaaaaggtgatagaggagttttacaatcaaacttgggtgcatagatacggagaatccatcctgccaaccactcttactacgctgtggagtctgtcggtggctattttctcggtcggcggcatgattggatccttttccgttggactctttgttaaccgcttcggacgccgcaactcgatgctgatgatgaatctcctggcgttcgttagcgcagtgctgatgggcttttcgaaactgggtaaatcgttcgaaatgctgatcctgggtcgttttatcatcggtgtctactgtgggctgaccactggtttcgtcccgatgtacgtcggggaagtgtccccaaccgcgctccgcggcgccctgggtacgctccaccagcttggaatcgtcgtcggcatcctcattgctcaggtgttcggtttggattctatcatgggcaacaaggatctttggccactgttgttgtcaatcatcttcatccccgcgctcctgcagtgcattgtgctgccgttctgcccggaatcacctaggttcttgctcatcaaccgcaacgaggagaatcgggccaaatcggtgctgaaaaaactcaggggaactgccgacgtgacccacgacttgcaggagatgaaggaagaaagccggcagatgatgagggagaaaaaggtcactatcctggaactgtttaggagccctgcttaccgccaaccgatcctgatcgcggtggtgctgcaactctcgcagcaactctcgggaatcaatgcggtgttctactattcaacctcaatctttgagaaggcgggagtccagcaaccggtgtacgcgaccatcggatcgggaatcgtgaacactgcgtttactgtggtgtcactttttgtggtggagcgcgcggggagaagaacgctccatctgatcggactggctggaatggcgggatgcgcaatcctgatgactatcgcgctggccctcctcgagcagttgccgtggatgtcgtacctgtccatcgtggccattttcgggtttgttgccttcttcgaggttggtccgggacctatcccgtggtttatcgtcgccgaactcttcagccaaggccctcgccctgccgctatcgccgtggctggcttctccaactggacctccaacttcattgtgggtatgtgcttccagtacgtggagcaattgtgtggcccgtacgtgttcatcatctttacggtgctgctcgtgcttttcttcattttcacttatttcaaggtgcctgaaactaaaggacggacttttgacgaaatcgccagcggattccggcagggtggcgcatcgcagtccgataagacccctgaagaactgttccacccattgggagcagattcgcaggtg

SEQ ID NO: 251196 - DNA, 1476 bp, synthetic construct
  misc_feature 1..1476: note = Description of Artificial Sequence: Synthetic coding sequence
  source 1..1476: mol_type = other DNA
atggagccatcttcgaaaaagcttactggaaggcttatgcttgccgttgggggtgcagtacttggctccttgcagtttggatacaacacaggagtaattaacgcaccacagaaggtgattgaagaattctataaccaaacatgggtgcaccgttatggcgaatccatacttccaacgaccctcactactttgtggtctctctctgtagctatctttagtgtgggaggaatgataggtagtttttcagtgggacttttcgtgaacagatttggaagaaggaattccatgcttatgatgaaccttcttgcttttgtttcggcagtcctcatgggattctcaaagttaggtaagtcctttgaaatgctaatccttggacgattcatcattggtgtgtattgtgggctcactacaggattcgtgcctatgtacgtcggagaagtatcgccgacggccctcagaggagccctaggaacacttcaccaactaggaattgttgtgggaatcttgattgcccaagtttttggattggattcgataatgggaaataaagacttatggccattattactctctattatttttataccggctttgcttcaatgtattgtgttgcctttctgtccggagtccccaagattcttgttaataaatcgaaatgaagagaatcgtgccaaatcagtgctgaaaaagctacgtggaactgccgatgttacccacgacctccaagagatgaaggaagaatctagacagatgatgcgtgagaagaaggtgaccatccttgagctttttcgctcacctgcctatcggcaacctatattgattgccgtcgtgttacaattatctcagcaactctctggaattaacgcggtcttttattatagcactagtatatttgagaaagcgggggttcaacaacccgtttatgccaccattggatccggaattgtgaataccgcattcacagtagtcagcctctttgtagttgagagagctggacgacgaactttgcatctaattggcttagctggaatggccggatgcgccattttaatgaccatagctctcgctttgttggagcagctgccttggatgtcatatctttctatcgttgcaatttttggattcgttgcattcttcgaggttggaccgggaccgatcccatggtttattgttgccgaattgttttctcagggacctcgtccagcagcaattgcagttgctgggttttcgaactggacttcgaacttcattgtaggaatgtgctttcaatatgttgaacaattgtgcgggccatacgtgttcatcattttcacagttcttcttgtcctcttttttatttttacttatttcaaggttccggaaactaagggaagaactttcgacgagatcgcaagtggtttcagacagggtggagcgtctcaaagcgataaaactccggaggaattgtttcacccactgggggctgactcacaggtg

SEQ ID NO: 251197 - DNA, 1476 bp, synthetic construct
  misc_feature 1..1476: note = Description of Artificial Sequence: Synthetic coding sequence
  source 1..1476: mol_type = other DNA
atggagccgtcgtcaaagaaacttactggaaggctcatgctggcagtgggtggggcagtgcttgggtcgctgcaatttggctacaacaccggagtgattaacgccccccaaaaggtgattgaggaattctacaatcaaacttgggtgcatcgctacggtgagagcattcttcctactacgctgaccacgctctggtcgctgtcagtggcgattttctcagttggcgggatgattggctccttttccgtgggcctttttgtgaatcgttttggcagaaggaactcgatgctgatgatgaaccttcttgccttcgtgtccgcggtgctgatgggattttcaaagttgggtaaatcgttcgaaatgctgattcttggtagattcatcatcggtgtgtactgcggcctcaccactggttttgtccccatgtacgtgggtgaggtttcgccgacggcgctccgtggtgcgcttggaacccttcaccaactcggaattgtggtggggattttgattgcccaagtctttggacttgattccattatggggaacaaagatctgtggcctcttcttctctccattatctttatacctgcgctcctccagtgtatcgtgctgcccttttgtcctgaatcgccacgattcctcttgattaacagaaacgaagaaaacagagctaaatcggtgctcaagaagctcagaggaaccgcagatgtcacccatgatcttcaagagatgaaggaagagtccaggcaaatgatgcgcgagaagaaggtgactatccttgaactttttcgttcgcctgcatacagacagcctatcctgatagcagtcgtgctgcagctgtcgcaacagctgtctgggatcaatgccgtcttttactattcaacttcaattttcgagaaggccggagtgcagcagcctgtttacgccacgatcggttccgggattgtcaacaccgcattcactgtggtgtcgttgttcgtcgttgagcgcgcgggccggagaactctgcatctgattggacttgcggggatggctggatgtgcaatcttgatgactattgcactcgccttgcttgaacaacttccttggatgagctacctgagcatagtggcaattttcggctttgtggcattctttgaagtcggtccaggaccaataccgtggtttatcgtggcagaattgttttcccaaggtccaaggcctgctgccatcgcagtggcgggttttagcaattggaccagcaactttatcgtgggtatgtgttttcaatatgtcgagcagctgtgcggaccatacgtgttcatcatctttacggtgcttttggtgcttttctttatcttcacctacttcaaggtcccagagactaagggaagaacttttgatgaaatagcatcaggatttcgccaaggcggggcatcacagtccgataaaacccccgaggagctgtttcatccactgggtgcagactcacaagtc

SEQ ID NO: 251198 - DNA, 1476 bp, synthetic construct
  misc_feature 1..1476: note = Description of Artificial Sequence: Synthetic coding sequence
  source 1..1476: mol_type = other DNA
atggagccatcctctaagaagttaactggccgtttgatgctcgccgtaggcggggctgttctcggttcactccagttcggatacaatacaggcgtgatcaacgccccacagaaggtgatagaggagttttacaatcaaacttgggtgcataggtacggcgagagcatcctccccaccaccctaacaactttgtggagcctcagcgtcgcgatcttctcagtcggtggcatgatagggtcattcagcgtgggactgttcgtgaatcgattcgggcgcaggaactcaatgcttatgatgaacctgttagctttcgtcagcgctgtactgatggggttctctaaattggggaagtcttttgagatgttgatattgggaagatttattataggcgtttattgtggcctgacaacaggcttcgtcccaatgtacgtgggtgaagtgagtcccacagccttgcgtggagcgctgggcaccttgcatcagttaggcatagttgtggggattcttatcgcccaggtgttcgggctcgatagcattatgggcaacaaggacctctggcccctgctactgtctatcattttcattcctgccttgttgcagtgcatcgtgctccccttctgtcctgaatcacctcgttttctcttaattaatcggaatgaagagaatagggctaaatctgtcctgaagaagctccggggtactgctgatgtcacccatgacttacaggaaatgaaagaagagagtcggcagatgatgcgggaaaagaaggtgaccattctggagctgttccggagcccagcttacagacaacccatccttattgctgtggtgcttcaactgagtcagcagctgtccggcattaatgcagtgttctactattctaccagtatctttgagaaggcaggcgtgcagcagcctgtgtacgcgaccattggctcaggcatcgtaaataccgcattcaccgttgtctctctcttcgttgtagagagggcgggaagacggacactgcacctgatagggctggccggcatggcgggttgtgctattcttatgacaatcgccttagctctcctcgaacagctgccatggatgagttacctgagcattgtggccatctttgggtttgtagcctttttcgaagtgggccctgggccaatcccctggtttattgtggccgagctgttctcgcagggacctcgcccggctgccattgccgtggcaggcttctcaaactggacttccaactttattgttggcatgtgcttccagtatgtggaacagctgtgcgggccatacgtgtttattatattcaccgtcttactcgtccttttttttatttttacctactttaaagtccctgagactaaggggcgcacgttcgacgaaatcgctagcggtttccgacaggggggtgctagccagtccgataagactcctgaggagctgtttcatccactcggggcagacagtcaagtg

SEQ ID NO: 251199 - DNA, 1476 bp, synthetic construct
  misc_feature 1..1476: note = Description of Artificial Sequence: Synthetic coding sequence
  source 1..1476: mol_type = other DNA
atggagccctcaagcaaaaagttgacgggtagacttatgcttgccgtgggtggagctgttctgggcagcttgcaattcggctacaacacgggagtcataaacgccccccagaaggttatcgaggaattctacaaccagacctgggttcaccgttacggtgagtccatcctgcccaccaccctgaccaccctgtggtccctgtcagttgctatcttctcggtcggaggtatgattggttccttctccgttggtctgttcgtcaaccggttcgggcggcgcaactccatgcttatgatgaacctgctagcgtttgtgtcggccgtgctcatgggcttttccaagttaggtaagtcttttgagatgctgatcctcggtcgtttcatcatcggtgtgtattgcgggctgaccacgggtttcgttcccatgtacgttggggaagtgtcccccaccgccctccgtggtgcgctgggtacactccaccaattaggcatcgtcgttggaatacttattgcccaggtgttcggtctggactcgatcatgggtaataaggatctgtggccacttcttttgtccatcatattcattcccgcattgctgcagtgcatcgtcctcccgttttgccccgagtctccgcgctttctcctcatcaacaggaatgaggagaaccgcgccaagagcgtactcaaaaagttgcgcggtaccgccgacgtcacccatgacctgcaggagatgaaagaggagtcccggcagatgatgcgcgagaagaaggttaccatcctagagctcttccgtagccccgcttatcgacagccgatccttattgctgtcgtcctgcagctctcacagcagctttccggtatcaacgccgtcttttattattccacctccattttcgagaaggctggtgtccagcaacccgtgtatgccaccattggctccggtattgtgaataccgcttttaccgtggtctcgctgttcgtggtcgagcgcgcaggacggcgcacgctgcaccttatcggtctggcaggcatggcgggctgcgcgatcctgatgaccatcgccctggcccttctggaacaactcccgtggatgtcttatctctccatcgtcgcgatcttcggttttgtggcttttttcgaggtcggaccaggccccattccatggttcattgtcgccgagctattctctcaaggcccgcgcccagcagctattgccgtggctggattcagtaactggacgagcaactttattgtgggaatgtgcttccaatacgtcgagcagctctgcggcccctacgtcttcattatcttcaccgtgctgttggtcctgttcttcatcttcacctacttcaaggtccccgagacaaaggggcgcactttcgatgagatcgcgtctggcttccgccagggtggcgcgagtcagtccgacaagacccccgaggaactgttccatccgttgggtgctgactctcaggtc

SEQ ID NO: 251200 - DNA, 1476 bp, synthetic construct
  misc_feature 1..1476: note = Description of Artificial Sequence: Synthetic coding sequence
  source 1..1476: mol_type = other DNA
atggagccatcatctaagaagctgaccggccgacttatgttagccgtcggaggagccgtactcgggtctttgcaattcgggtacaacacaggcgtgattaatgctccacaaaaggtaatcgaagagttctataatcagacttgggtgcaccgctatggcgagagcatcctccccaccacactgaccactctgtggagcttgagcgtcgccatattctccgttggaggaatgattgggagtttctctgttggactctttgttaaccggtttggccgccgaaactccatgcttatgatgaatctgttggcttttgttagtgcagtgttgatgggcttttctaagctgggaaagagttttgaaatgcttatcctcgggaggtttatcatcggcgtttattgtggcctgacaactggctttgtaccaatgtatgtaggcgaagtgtccccgacagctcttaggggcgcactcggtaccctgcatcagctgggaatcgtggtgggcatcctcatcgcccaagtctttggcctggattcaatcatggggaacaaggatctctggccacttctcctttctataatctttatacccgctttgttgcaatgtatcgtgttacctttttgcccagagtcccctaggtttctcctaattaatcggaacgaagaaaacagggccaagtcagtgctgaagaagctgcgcggaacagcagacgtaacccacgacctgcaggaaatgaaggaggaaagtcgtcaaatgatgagggaaaagaaggtcactattctcgagctgttccgatccccagcctacaggcagcccatcctgatcgctgtggtcctacaactgagccaacaactgtcaggtataaatgcagtattctactattccacttccatcttcgagaaagccggtgtgcaacagcccgtgtacgccacgatcggctccggcatcgtcaatacagctttcacggttgtttctctgtttgtggtcgagcgagctggtagacgaactctccacttaatcggcctggctggcatggccgggtgtgccattctaatgactatcgccttggcgctgcttgaacagttaccctggatgtcatatctgtcgatcgttgcaatcttcggctttgtagctttctttgaggtcggccccgggcccataccgtggtttattgtggccgaactttttagccaagggccccggccagctgccatagccgtggcgggcttctctaactggacctcaaactttatcgtagggatgtgcttccagtacgtcgaacaactttgcgggccctacgtctttatcatcttcactgtactccttgtgttgttctttattttcacctacttcaaagttccagagacaaaggggagaacgttcgatgagatcgcttccgggttccggcaggggggcgcctcgcagtccgacaaaacacccgaggaactctttcaccccctcggagccgactctcaggtt

SEQ ID NO: 251201 - DNA, 1476 bp, synthetic construct
  misc_feature 1..1476: note = Description of Artificial Sequence: Synthetic coding sequence
  source 1..1476: mol_type = other DNA
atggagccctcaagcaagaagctcactggacgcctgatgctggcggtgggcggtgctgtgctgggttcactgcaattcggctacaacaccggcgtcatcaatgcccctcaaaaagtgatcgaagagttctacaatcagacctgggtgcataggtacggtgaaagtatcctgccgacgaccctgaccaccctttggtccctgtctgtggccatctttagcgtggggggtatgatcggttccttcagcgtgggactgttcgtgaatcgcttcggacggagaaactccatgctcatgatgaatctgttggcgttcgtgtcggccgtgctcatgggattctcgaaacttggtaagtcgtttgaaatgctgatcctgggtcggttcatcatcggagtgtactgtggactgaccacgggctttgtgccgatgtacgtgggagaagtgtccccgacggccctcaggggtgccctgggaactctgcaccagctgggaatcgtggtcggtatccttattgcccaggtgttcggcctggatagcattatgggtaacaaagacctgtggccgttgctcctgtcaataatcttcatcccggcattgttgcagtgcatcgtcctgccattctgcccagagtcgccgagattcctcctgatcaacagaaacgaggagaacagagccaaaagcgtgttgaagaagctgcgcggaactgcggacgtcacccacgacctccaggaaatgaaagaggagtcccggcagatgatgcgcgaaaagaaagtcaccatcctcgagctctttagatcgccggcataccgccaaccgatcctcatcgcagtggtcctgcagctctcgcagcaactgtcgggcatcaatgcagtgttttactactcaacttcaattttcgagaaggccggtgtgcagcagcctgtctacgctactatcgggagcgggatcgttaacaccgcgttcactgtggtgtcgctcttcgtggtggagagagccggacgaagaaccctgcatctgatcgggctcgcgggcatggcgggatgcgccatcctgatgacgatcgcattggccctcctggaacaactgccatggatgtcgtacttgtcgatagtcgcaatcttcggattcgtggccttctttgaggtggggccgggaccgataccgtggttcatcgtggccgaactcttctcacagggcccacggccagctgccatcgctgtggcagggttttccaattggacctcgaactttatcgtgggaatgtgttttcaatacgtcgagcaactgtgcggaccctacgtctttatcattttcaccgtgttgctcgtgctgtttttcatcttcacctacttcaaagtgcctgagactaagggaagaacgtttgacgaaatcgcttccgggttcagacaaggcggagccagccagtcagataagactccagaagagctctttcaccctctgggcgcagactcgcaggtc

SEQ ID NO: 251202 - DNA, 1476 bp, synthetic construct
  misc_feature 1..1476: note = Description of Artificial Sequence: Synthetic coding sequence
  source 1..1476: mol_type = other DNA
atggagccatcttctaagaaactgacaggaagactgatgctcgcagtggggggagccgtgctgggatctctccaattcggttacaacacaggggtgattaacgccccccagaaggtgatcgaggaattctataaccagacctgggtgcatagatacggagaaagtatccttcctaccactcttacaacattatggtctctatctgtcgccattttcagtgtgggagggatgattggctctttctccgtcggcctgtttgtcaataggttcggccgcaggaactccatgctgatgatgaaccttttagcctttgtcagcgcggtgctgatggggttctccaaattgggcaaatccttcgagatgttgatcctggggaggtttataatcggggtgtattgtggcttaactactggatttgtgccgatgtacgtcggggaggttagtccaacagccctaaggggcgccctcgggacgttgcaccaactcggcatcgtagtggggatcctgatagcccaagtcttcggtctggactcaatcatgggtaataaggatctttggcctcttctgctgagtattattttcatccccgcacttctgcagtgcattgtgctccctttctgccctgaatcgccccggtttttgctcattaataggaatgaggagaaccgcgctaaatccgtgctgaagaagttgaggggcacagcagatgttacacacgacctccaggagatgaaggaggagagccggcaaatgatgagagagaagaaagtgaccatccttgaattgtttcggtcccccgcatataggcaaccaatactgattgctgtcgttttgcagttatcccaacagttgtccggcataaacgcggtgttctactactcaactagcatcttcgagaaggccggtgtccagcagccggtctacgccactatcgggagtggtatcgttaatactgccttcacagtcgttagcttgttcgtggtggagcgagccggccggagaactctgcatctgatcggcttggctggtatggctggctgtgctatcttgatgaccattgccctcgccctcctggagcagctaccatggatgagttatctgtctatagtggccatattcgggtttgtggcttttttcgaggtgggccctggaccaatcccctggttcattgtggccgaacttttctcacaagggcccagacccgctgccatcgccgtagctgggttttctaactggacctccaattttattgtgggtatgtgcttccaatacgttgagcagctgtgtgggccctatgtcttcattatttttacagtgctattggtgcttttcttcatcttcacttattttaaagttccggagacgaagggacggacattcgacgagattgcttccggattccgccaagggggagccagccagagcgacaaaaccccggaggaactcttccacccactgggcgccgactctcaggtg

SEQ ID NO: 251203 - DNA, 1476 bp, synthetic construct
  misc_feature 1..1476: note = Description of Artificial Sequence: Synthetic coding sequence
  source 1..1476: mol_type = other DNA
atggaaccgtcatccaagaaacttacggggaggctcatgctggcagtgggaggcgctgtcctgggttccttgcagtttggatacaacaccggggtgatcaacgcgcctcaaaaggtgattgaagagttttacaaccaaacttgggtgcatcgctacggtgagagcattcttcccactactcttactaccctgtggagcctctccgtcgcaatattctccgtcggtggtatgatcggatccttcagcgtgggactgttcgtgaacaggttcggaagaaggaactcaatgctcatgatgaaccttctcgcgtttgtgtccgcagtgctgatggggttttcaaagctgggaaagagctttgagatgctcatcctgggaagattcataatcggcgtgtactgtgggctgactactgggtttgtgcccatgtacgtgggggaggtcagccctacggcgcttaggggtgccctcggtaccttgcatcagcttggaatcgtcgtgggaattcttatcgcccaagtgtttggccttgattcgattatgggaaacaaggatctttggccactgcttctgtcgattatctttattcctgcgttgcttcaatgcattgtcctgcctttctgtccagaatcgccaagatttctcctgatcaaccgaaacgaggaaaaccgggcaaaatcggtcctgaagaagctgagaggtaccgcggacgtgacgcacgatctccaggaaatgaaggaagagagccgccagatgatgcgcgagaaaaaagtgactattctcgagctgttcagatccccagcttacaggcaaccaattttgatagccgtggtgctgcagctttcccagcagttgagcggaattaacgccgtgttttactactccacgtcgatctttgaaaaggctggcgtccagcagcctgtttacgcgaccatcggtagcggtatcgtgaatacggcctttactgtagtctcactgttcgtcgtggaacgcgcaggcagaaggacccttcatctgatcgggctcgccggcatggcaggttgtgcaatactgatgactatcgccctggcactcttggaacagctcccctggatgagctacctctccatcgtcgccattttcggattcgtcgcttttttcgaagtgggacccggccctataccttggtttatagtcgcagagcttttctcgcagggtccaagacctgccgccatagccgtggcaggattttcgaattggaccagtaactttatcgtgggcatgtgctttcagtacgtcgaacaactttgtggaccttatgttttcattatctttactgttctgctggtgcttttcttcatattcacttacttcaaagtccccgaaaccaaaggccgcacctttgatgagattgcatccggattccgccaaggtggtgcatcacaatccgataaaactcccgaagagcttttccaccctcttggtgcagattcccaagtg

SEQ ID NO: 251204 - DNA, 1476 bp, synthetic construct
  misc_feature 1..1476: note = Description of Artificial Sequence: Synthetic coding sequence
  source 1..1476: mol_type = other DNA
atggaaccaagttctaaaaaacttaccggaagattaatgcttgcagttgggggtgctgtattaggaagtttacaattcggatataatacaggagtaattaacgctcctcaaaaagttatagaagaattttataatcaaacttgggtacatagatatggtgaatcaattcttccaactactttaactacattatggtctctttcagttgctattttctcagttggtggaatgatcggatctttctctgtcggactttttgttaatcgttttggtagaagaaatagtatgcttatgatgaatcttttagcttttgtttcagcagttttaatggggtttagtaaacttggtaaatcattcgaaatgttaattcttggtagatttattattggagtttattgtggtttaactactggattcgtaccaatgtatgttggtgaagtttccccaacggcacttagaggagcattaggaactttacaccaattaggaattgtcgttggaattcttattgctcaagtttttgggttagatagtattatgggaaataaagatttgtggccacttcttttaagtattatttttattccagcattacttcaatgtattgttttaccattctgtccagaatcaccaagattcttattgatcaatagaaatgaagaaaatagagcaaaatctgttcttaaaaaattaagaggaacagctgatgtcacacatgatttacaagaaatgaaagaagaatcaagacaaatgatgagagaaaaaaaagtaacaattcttgaactatttagaagtcctgcatatagacaaccaattcttattgctgtcgttttgcaattgtctcaacaattgagcggtatcaatgctgttttttattattctacgtcaattttcgaaaaagctggagttcaacaaccagtttatgcaactattggatcaggaatcgttaatacagctttcacagttgtatctttatttgttgttgaaagagcaggaagacgtactttacatttaataggattagctggtatggcaggatgtgccattttaatgacaattgctttagcattacttgaacaacttccatggatgtcttatctttcaattgtagctatttttggatttgttgctttttttgaagttggtccaggaccaataccatggtttattgttgctgaacttttttcacagggtccaagaccagctgctattgctgtagcaggattttctaattggacatcaaattttattgtaggtatgtgttttcaatatgttgagcaactttgtggaccttacgtttttattatcttcactgtattattagttctttttttcattttcacatattttaaagtaccagaaacaaaaggaagaacatttgatgaaattgcttctggattccgtcaaggaggagcatcacaatcagataaaacaccagaagaattatttcatcctttgggagcagattcacaagta

SEQ ID NO: 251205 - DNA, 1476 bp, synthetic construct; identical to SEQ ID NO: 251202
  misc_feature 1..1476: note = Description of Artificial Sequence: Synthetic coding sequence
  source 1..1476: mol_type = other DNA

SEQ ID NO: 251206 - DNA, 1476 bp, synthetic construct
  misc_feature 1..1476: note = Description of Artificial Sequence: Synthetic coding sequence
  source 1..1476: mol_type = other DNA
atggagcccagtagtaagaagctaaccggccgactcatgcttgcggtcgggggggccgtactgggctcactgcagttcggatataacaccggggttattaacgccccccagaaggtcattgaggagttttacaaccagacttgggtgcaccgctatggtgaaagtattctccccacaacactgaccaccctgtggagtctctccgtagccatcttttctgtgggagggatgatcggaagcttttcagtgggcctgtttgtgaatcggttcggacggcgcaattctatgctaatgatgaatctgctcgcctttgtctccgctgtactcatggggttcagcaagctgggcaaatcattcgaaatgctgattctcggccgcttcatcatcggagtgtattgtggcctgactacaggtttcgtgcccatgtacgtgggagaggtttcccccacagccctgcgaggagccctggggacactgcaccagcttggaattgtcgtgggcattctcatagcacaagtgtttggacttgactctataatgggcaataaagacctctggccactattactgtccatcatttttattcccgctttacttcagtgtattgttctccccttctgtccagagtctcctaggttcctgttgatcaaccgaaacgaggagaatcgggctaagagcgttctcaaaaaactgagaggcacggccgatgtcacacatgatctgcaggagatgaaggaggagtcgcgccagatgatgagagagaagaaggtcacgatcctggaactattcagaagtccagcctacaggcagcctatactgatagccgtggtgctccagctgtcccaacagctgtccggcattaatgcggtcttctactacagtactagcatcttcgaaaaagcgggagttcagcagcctgtttacgcgactatcggctcgggtatcgtgaacacagcgttcacggtggtgagcctgttcgttgtggagagagcgggccggcggactctgcacctcatcgggctagccgggatggctggttgtgctattctgatgactatagccctcgcacttctggagcagctaccttggatgtcatatctgtcaatcgtggcaatcttcggatttgtagctttttttgaggtgggtcccgggcctattccgtggtttatcgtagccgagcttttctctcaggggccgagaccggctgctatcgcggtggcgggcttttccaattggacaagtaacttcatagtgggtatgtgctttcagtacgtggaacagctttgtggtccttacgtgtttattattttcactgttctgcttgtcctatttttcattttcacatattttaaggtccccgaaaccaagggcaggacctttgacgagattgcctcaggttttagacagggtggtgcctcgcaatccgacaagacccctgaagagctatttcatcccctgggggccgattcccaagta

SEQ ID NO: 251207 - DNA, 1476 bp, synthetic construct
  misc_feature 1..1476: note = Description of Artificial Sequence: Synthetic coding sequence
  source 1..1476: mol_type = other DNA
atggagccttcaagtaagaaacttactggcagattgatgttagcagttgggggtgctgttttgggttcccttcagtttggatataacacaggcgttattaacgctccccagaaagtgatagaagaattttataatcagacatgggtgcatcgttacggtgagtcaattctccctactaccctcaccacattatggtctttgtctgtagcgattttcagcgtgggagggatgataggttcattcagtgtcggtctgtttgtaaacagattcggtcggagaaattccatgcttatgatgaatctcctcgcatttgtttcagccgttcttatgggattctcaaagttggggaaatctttcgaaatgctcattctgggtaggtttatcataggagtgtattgcggtttgacaactggctttgttccaatgtatgttggggaggtaagtcctacagccttacggggagcattaggcactcttcaccaactggggatagtagttgggatcctgatcgcccaagtgttcggtcttgatagtatcatgggtaacaaagacctttggccacttctcttgtcaataatttttatcccggccctcttgcagtgtattgtgttacctttctgtcctgaatcaccaagattcttactcattaataggaacgaggagaatagagccaagtcggttttaaagaaacttcgcggaactgcggatgttacacacgatcttcaggaaatgaaagaagaatctagacagatgatgcgtgagaaaaaggtcacaatcttagaactttttaggagtccggcatacaggcaacccattttaattgctgtggtattgcagttgtcgcagcagctctcaggcataaatgccgtattttattactctacatcaatatttgagaaagccggcgttcagcaacctgtatatgctactattggatctggaatagtgaatacagctttcaccgttgtgtccttgtttgtcgtggaaagggccggtaggaggacactgcacttaatcgggttggctggaatggccggctgtgcgatacttatgacaattgctctagcgttactcgaacagctaccatggatgagttatttgtcaattgtagctatttttggatttgtggcctttttcgaggtcggaccgggaccaattccatggtttatagttgcagaactctttagtcagggaccaagacccgctgcaatcgccgtggctggattttcaaactggactagcaactttatcgtaggtatgtgcttccagtacgttgaacaattgtgtggtccttacgttttcataatctttactgtccttttggttttgtttttcatattcacctacttcaaagttccagaaaccaaaggacgtacctttgatgaaatagcatcaggttttagacagggaggggcttcacaaagcgataaaactccagaagagctattccacccgctaggagctgacagccaagtt

SEQ ID NO: 251208 - DNA, 1476 bp, synthetic construct
  misc_feature 1..1476: note = Description of Artificial Sequence: Synthetic coding sequence
  source 1..1476: mol_type = other DNA
atggaaccttcgtcaaagaagctcacgggtcggctcatgctggcggtgggaggtgcagtgctgggctccctgcaattcgggtacaacaccggagtgatcaacgctcctcagaaagttatcgaggagttctacaaccagacttgggtccaccgctacggggagtcgatcctgccgaccactctgaccaccctctggtcactctcagtggcgatcttcagcgtcggaggcatgatcggctcgttttcggttggactctttgtgaaccgcttcggaagaagaaacagcatgctcatgatgaatctgctggcgtttgtctcagctgtcctgatgggattctccaagctcggaaagtccttcgagatgctgatcctgggacgttttatcatcggagtctactgtggactgaccaccggatttgtgccaatgtacgtcggcgaggtgagccctactgcgttgagaggcgctctcggaactctgcaccagttgggaatcgtcgtcggcatcctcatcgcgcaggtctttggcctggacagcatcatgggaaacaaagacctttggccactgctcctgtcgatcatcttcattccggcgctgttgcagtgcatcgtgctgccattctgcccggaatctccgaggttcttgctcatcaacagaaatgaggagaatcgagctaaatcggtgctgaaaaagctgcgcggaaccgccgatgtgacccatgatctgcaagagatgaaggaagaatcaagacaaatgatgagagaaaagaaggtcactatcctggagctgttccggtcgccggcctaccggcagccgattctgattgctgtcgtgctccagctgtcccagcagctgtccggaatcaatgccgtgttctattacagcacctcgattttcgaaaaagccggggtccaacaaccggtttacgccactataggctcgggtattgtcaataccgcttttacggtcgtttcactgttcgtggtggaacgggccggaagaaggacccttcacctcataggattggcaggaatggccggatgcgccatactcatgaccattgctctcgctctgctcgaacaactcccatggatgtcgtacctctcgatcgtggcaatctttggattcgtggcctttttcgaagtggggccgggaccgatcccatggttcatcgtggctgagttgttctcacaggggccgcgcccggcggcgattgcagtggcggggttctcaaactggacttcaaacttcatcgtcggaatgtgtttccaatacgtggaacagctgtgcggaccatacgtgttcatcatcttcactgttctgctggttctgtttttcatcttcacctacttcaaggttcccgaaactaaggggcgaactttcgacgagatcgcctccggtttccggcaaggaggcgcctcgcagtcggacaagaccccggaagaactctttcatccgctcggcgccgatagccaggtc

SEQ ID NO: 251209 - DNA, 1476 bp, synthetic construct
  misc_feature 1..1476: note = Description of Artificial Sequence: Synthetic coding sequence
  source 1..1476: mol_type = other DNA
atggaaccatcgtcaaagaagctgacgggacgtctgatgctggcagtgggaggagcagtgctcggctccctccaatttggatacaacactggagtgatcaatgcgccacaaaaagtgatcgaagaattctataaccaaacctgggtacataggtacggagaaagcattcttcccactactctgaccaccctgtggagcctgtccgtcgcaatcttctccgtcggtggcatgatcggatccttttctgtgggactttttgtgaacagatttggcaggcgtaacagcatgctgatgatgaatctgctggcttttgtgtcagcagtcctgatgggattttcgaaacttggaaagagcttcgagatgctgatactcggccggttcattatcggtgtgtactgcggccttactaccggatttgtgcctatgtacgtgggagaagtgtccccaaccgcactccgcggagccttgggcacgctgcaccaacttggaatagttgtgggaatcctgatagcccaggtgtttggattggacagtatcatgggcaataaggatctgtggccgctgctgctgtcgatcattttcatcccagcactgctccaatgcattgtccttcccttctgtcctgaatcccctagatttttgctcattaaccgaaatgaggaaaatagagccaagtcagtcctcaagaaacttagagggactgcggatgtcactcatgacctgcaagaaatgaaagaagaatcacgccagatgatgagagaaaagaaggtcactattctcgagttgtttcggtcaccagcataccgccagcccatccttattgcagtggtgctgcaactgtcacaacaactctcaggtattaacgccgtgttttactactccacgtcgattttcgagaaggctggagtgcagcagccagtgtatgcgactatagggtcgggtatcgtgaacactgcatttaccgtcgtgtcgctgttcgtcgtcgaaagggcaggtagacgcaccctgcaccttattggtctggcaggtatggccggctgtgcaatccttatgactatagcgttggctcttctggaacaacttccctggatgagctacctgtcgattgtggcaattttcggattcgtggcattctttgaggtgggacctggaccaatcccctggttcattgtggctgaactcttttcacaaggtcctagacctgcagcgattgcagtggccggattttcaaattggacctcgaactttatcgtggggatgtgttttcagtacgtcgaacaactttgcggaccttacgtctttatcatattcactgtgttgctggtgctcttcttcattttcacttactttaaggtgccggagacgaagggccgaactttcgacgagattgcatccggttttaggcaaggtggagcgtcccagagcgataagactcctgaggagctcttccatccgttgggagcagacagccaagtg

SEQ ID NO: 251210 - DNA, 1476 bp, synthetic construct
  misc_feature 1..1476: note = Description of Artificial Sequence: Synthetic coding sequence
  source 1..1476: mol_type = other DNA
atggagccctcgtcaaagaaattgactggtcgtttgatgctggcagtcggaggtgctgtgctcggatcactgcagtttggttataacaccggggtcatcaacgcgcctcaaaaggtcattgaagagttttacaatcaaacctgggtgcaccggtacggggaatcgatcctgcctaccacccttaccactctctggtcactgtcagtggcgattttctcggttggcggtatgattgggtcatttagcgtgggactctttgtgaaccgctttggtagaagaaactccatgctcatgatgaatcttcttgcttttgtcagcgccgtgcttatgggtttttccaagctgggtaaatcgtttgaaatgcttattcttggaaggtttatcattggcgtgtactgcggactcactaccggatttgtcccaatgtacgtgggagaagtgtccccaactgcgcttcgaggtgctctgggtacccttcatcagctggggatcgtggtgggcatccttattgctcaggtctttggactggactcaattatgggaaacaaagacctttggcctcttcttctttcgattatctttatccctgcattgctgcagtgtattgttcttcctttctgcccagaatctccccggttcctgctgattaacagaaacgaggaaaaccgggctaaatcagtgctcaagaagttgcgcggtaccgccgatgtgactcatgatcttcaagaaatgaaagaggaatcgcggcaaatgatgcgggaaaagaaggttaccattctggagctttttcgaagccctgcgtaccgtcaacctattctgattgcagtcgtgctgcaattgtcccaacagctgtcggggatcaacgcggtgttttactactccacgtcgatcttcgagaaggcgggtgtgcaacaacctgtctacgcaaccattggttccggtatcgtgaataccgcattcacggtggtgtcgctgtttgtggtggagagggcagggcggaggactcttcatctcattggtttggcaggtatggccggatgtgcaatccttatgaccatcgcactggcactcctggagcagctgccttggatgtcatacctgagcatagtggccatcttcggatttgtcgctttcttcgaggtggggcccgggccaattccgtggtttattgtggcagaacttttctcccaaggtccacgacctgcagcaatcgcagtggccgggtttagcaactggacgtcaaacttcatcgtgggaatgtgttttcaatacgtggaacagctttgtggaccatacgtctttatcatattcactgtccttctcgtgctgttctttatcttcacctacttcaaggtgccagaaaccaagggccgcacctttgacgaaattgcaagcggttttagacagggaggtgcatcacaatccgacaagactccagaagagctttttcaccccctcggggccgattcccaagtg

SEQ ID NO: 251211 - DNA, 1476 bp, synthetic construct
  misc_feature 1..1476: note = Description of Artificial Sequence: Synthetic coding sequence
  source 1..1476: mol_type = other DNA
atggaaccctccagtaaaaagttgacaggacgactgatgctcgctgttggaggcgccgtgctgggatcactgcaattcgggtacaataccggcgtgatcaacgcgcctcagaaagtgatagaggagttctacaatcagacatgggtgcacaggtacggagagtccatactgcccaccacgctaacaaccctgtggtcactctccgtggccatcttttcagtgggtggtatgattggatctttcagcgtgggtcttttcgtcaaccggtttggtcggagaaatagtatgctgatgatgaatctgctggccttcgtgtcagcagtcctcatggggttttctaagctcggtaagtcttttgagatgctgatcttggggcgtttcataataggggtttactgcggactgactacgggtttcgtacccatgtatgtgggcgaagtgtcacccaccgcactgcgcggtgcactgggaaccctacaccagctgggaatcgtggttggaattctgatcgcccaagtcttcggactggatagtattatgggcaacaaggacctgtggcccctccttctgtccattatattcatccctgctcttcttcagtgcattgtcctgcccttttgtcctgaaagccctcgctttctgctcataaatcgaaacgaagaaaatcgggcaaagtcggtcctcaaaaaacttcggggcactgccgatgttactcatgacttacaggaaatgaaggaggagagtcggcagatgatgcgggaaaaaaaggtgaccatcttagaactgttcaggagccccgcctatcgtcagccaatcctgatcgctgtcgtgttacaactcagccagcagctgtcggggatcaacgcagtgttttattatagtacgagcattttcgagaaagccggggttcagcagccagtgtacgcaaccatcggctctgggatagtaaataccgcttttaccgtcgtgagccttttcgtggttgagcgggccggaagacgtaccttgcaccttatcgggttggccgggatggctggctgtgctatcctgatgacaattgctttagctctgttggaacagctgccatggatgagctacctctctattgtggccatcttcggcttcgtggccttcttcgaagttggcccgggccctattccctggttcattgtcgccgagcttttcagtcaaggacctcgtccggccgccatcgctgtggccggcttcagcaactggacttctaactttatcgtggggatgtgcttccaatacgtcgagcagctgtgcggtccttacgttttcatcatatttacagtgctcctggtcctcttcttcatattcacttattttaaagtccctgagactaaaggcaggacattcgacgaaattgctagcgggttcagacagggcggagcatcacagtccgacaaaacccctgaagaacttttccatcctctgggagcggactcccaggtc

SEQ ID NO: 251212 - DNA, 1476 bp, synthetic construct
  misc_feature 1..1476: note = Description of Artificial Sequence: Synthetic coding sequence
  source 1..1476: mol_type = other DNA
atggaaccttcttctaaaaagcttactgggcggctcatgctggccgtggggggggccgtcttaggatctttacagttcgggtacaacacaggggtgatcaacgcacctcagaaagtgatagaagaattctataatcagacatgggtgcacagatatggggaatcaatcctgcctacaactctcacaactctatggtctctctctgtagccatcttcagtgtagggggaatgatcggatccttttctgtagggctgtttgtaaataggtttggacgccgaaattccatgctgatgatgaacttactagcatttgtgtctgctgtgctcatggggttctctaaactggggaagagttttgaaatgctaatcctaggaaggtttataatcggagtatattgtgggctcacaacaggattcgtaccaatgtatgtaggagaagtgtctcccacagcactccggggagcattagggactcttcatcagcttggaattgtggtggggattctaattgctcaggtcttcgggcttgactccataatgggaaataaggatctctggccactccttctgtcgatcatcttcattcctgcgctactgcagtgcattgttctccctttttgtcccgaatctccacggtttctcctcatcaaccggaatgaggaaaatagagcaaaatctgtgctgaaaaagctaaggggaacagccgacgttactcatgatctccaggaaatgaaggaggaaagtagacagatgatgagagaaaagaaagtaacaatcttagaattgttcagaagtcctgcgtatcggcaacctatacttatagccgtcgtgctacagctttcccagcagctctcaggaatcaatgccgtgttttattactctacttcaatatttgaaaaggccggagtccagcaacctgtatatgctactataggatctgggatcgtgaatactgcgtttacagtcgtgtcgctgtttgtggtggagagagccggacgccggactttacatctcataggattagcgggaatggcgggatgtgctatcctcatgacgatcgctcttgcactactagaacagctgccttggatgtcctacttatcaattgtagccatctttgggtttgttgccttcttcgaagtaggaccagggcccataccatggttcatcgtcgcagaactattctcccagggacccaggccagcagccatcgccgttgctgggttttccaactggacaagtaacttcattgtaggaatgtgttttcaatatgtcgaacagctctgtgggccctatgtgttcatcatatttactgtcctcctagttttatttttcatttttacatattttaaagtgcccgaaacaaaagggcgaactttcgatgaaatcgcttctggattccgacaaggaggagcctcccagtccgataaaacacccgaagaactctttcaccctctgggagccgattcccaggtt

SEQ ID NO: 251213 - DNA, 1476 bp, synthetic construct
  misc_feature 1..1476: note = Description of Artificial Sequence: Synthetic coding sequence
  source 1..1476: mol_type = other DNA
atggaaccaagctcgaagaaacttaccggacgactgatgctggctgtgggaggagctgtcctggggtccctccaattcggatacaatactggggtcataaacgctccacagaaagtgatcgaggaattctataatcaaacgtgggtccacagatacggagaatcaatcttgccaactactttgaccaccctctggtccctttcagtcgctattttctcagtgggcggaatgatcggatccttttccgttggactgtttgtgaaccgcttcggacggcgcaacagcatgctgatgatgaatctgctggccttcgtgtccgcagtccttatgggattttccaaactgggcaagtctttcgaaatgctgatcctgggccgcttcattatcggtgtgtattgcggactgactaccggtttcgtgccgatgtacgttggggaagtgagcccaaccgctctccgcggcgcattgggtactctgcaccagctggggatagtagtggggatcctcatcgcgcaggtctttgggcttgactcgatcatgggaaataaggacttgtggccgctgctgttgtcgataatcttcatcccggcgctcctgcaatgcatcgtgctcccattctgccctgaatcgccgcgcttcctgctcatcaacagaaacgaggagaaccgcgcgaagtccgtgcttaagaagttgagaggcactgcggatgtgacccacgacctccaggaaatgaaggaggagtcacggcagatgatgcgggaaaagaaagtcaccatcctggagcttttccggtcgccagcctaccggcagcctatcctcatcgcagtggtgctgcaattgagccagcagctgtctgggattaacgcagtgttttactactcgactagcatcttcgagaaagcgggcgtccagcaaccggtctacgcaactatcggctcaggaatcgtgaacaccgcttttaccgtcgtgtccttgttcgtggtggaaagagccggcagacgcaccctgcatctgatcggcctcgctggaatggccgggtgtgcgatcctgatgaccattgccctcgccctcctcgagcaactgccgtggatgtcttacttgagcatcgtggccatcttcggcttcgtggcctttttcgaagttggacctggtccgataccctggttcatcgttgcagagctgttcagccaaggacctcgaccggccgccatcgccgtcgccgggttcagcaactggacttcgaacttcattgtcggaatgtgtttccagtacgtcgaacagttgtgcggtccatatgtgtttatcattttcactgtcctcctggtcctcttcttcatctttacctacttcaaggtgccggaaacgaaaggaagaacttttgatgagatcgcctccggattccgacagggaggtgcgtcgcaatcagacaagacccctgaggaacttttccatccgctgggggccgattcccaggtg

SEQ ID NO: 251214 - DNA, 1476 bp, synthetic construct
  misc_feature 1..1476: note = Description of Artificial Sequence: Synthetic coding sequence
  source 1..1476: mol_type = other DNA
atggaaccttcctctaagaagctgacaggccgcctgatgttagcagtgggaggcgccgttctgggcagtttgcaattcgggtataacacaggcgtgatcaacgctcctcaaaaagtgattgaggagttttataaccagacatgggtgcatcggtacggagagtccattttgcctactaccctgaccaccctgtggagcctcagcgttgctattttctctgtaggcggtatgataggttcgttttcagtcggactatttgtgaatagatttggacgccgcaacagtatgttgatgatgaatttgcttgctttcgtatcagctgtgctgatgggttttagcaaactgggcaagagcttcgagatgcttatcttagggcgctttatcataggagtgtattgcgggctcaccacagggttcgtgccaatgtatgttggagaggtgtcccccaccgccctgagaggtgcgttaggcaccctccatcagcttggaattgtggtcggcatattgattgcccaggtgttcgggctagactccatcatgggcaataaagacctctggccactcctgttatcaattattttcatcccagccctgctgcagtgcatcgtcctgcccttctgcccggaaagtccacggttcctgctgattaatagaaatgaagagaaccgcgccaagtcggtgctcaagaagctgaggggtacagctgatgtaacccacgacttgcaggagatgaaagaagagtcccgtcaaatgatgcgcgagaaaaaggtaaccattctggaactcttccggagccccgcgtaccgccagcccatactcattgcagtggtgctccagctctcccagcaactgtcggggatcaatgccgtattctactacagcacatcgatctttgaaaaggctggggtacagcagcctgtgtacgccacaattggatccggcattgtgaacactgcctttacggtcgtcagcctgttcgtggtcgaaagggccggccgacggacgctgcatctgatcggactggcagggatggccggctgtgccatcctgatgactattgccctggccctgctggaacagctcccctggatgagctacctttctatcgttgccattttcggtttcgtggctttcttcgaggttggccctggacctatcccatggtttattgtggcagagctgtttagtcagggtccccgacccgccgctattgccgtggccggattctccaattggaccagtaactttatcgtcggaatgtgctttcaatacgtcgagcagctctgcggtccgtacgttttcattatcttcacagtcttactcgtactgttctttatctttacatacttcaaggtgcctgaaacaaagggacgcacattcgacgaaatcgctagcggatttaggcagggtggagccagccagagcgacaaaactccagaggagctcttccaccctctgggggcggactcccaagtc

SEQ ID NO: 251215 - DNA, 1476 bp, synthetic construct
  misc_feature 1..1476: note = Description of Artificial Sequence: Synthetic coding sequence
  source 1..1476: mol_type = other DNA
atggagccgagctcaaaaaagttgaccgggcgcctcatgctcgccgtcggaggagcagtgctgggctcattgcagttcggctacaatacgggcgtcattaacgcgcctcagaaggtaatcgaagaattctataatcagacctgggtgcacaggtacggcgagtcgatcttgccaactaccttgaccaccctgtggagccttagcgtggccatcttttcggtgggaggcatgatagggtcctttagcgtgggattgttcgtgaatagattcggacggcgaaacagcatgctcatgatgaacctcctggccttcgtgagcgcagtcctgatggggttctccaagctggggaagtccttcgaaatgctgatacttggacgcttcattatcggtgtctactgtggactcactacgggatttgtgccgatgtacgtaggtgaagtttctccgaccgcactgcggggagctctgggcactctccatcagttgggtattgtggtcggtatcctcatcgcgcaggtttttggacttgactccattatgggaaataaggacctctggccgttgctgctgtcaatcatcttcatccccgccctcctgcaatgcatcgtgctgccattctgcccggagtcgccgcgattcttgctcatcaaccggaacgaggagaatagagctaaatcggtgctcaaaaaactgagaggcactgctgatgtgacccatgaccttcaggaaatgaaggaggagtcccgacagatgatgagagaaaagaaggtgaccattctggaattgtttaggagccccgcctaccgccagcctatccttatcgccgtggtcctgcaactgtcacaacagctgtcgggcattaacgcagtgttctactactccacctccatcttcgagaaagcgggagttcaacagccagtgtatgcgactatcggatcggggatcgtgaacaccgccttcactgtcgtctcacttttcgtcgtcgaacgcgcgggccgccgtactctgcacctgatcggactggccggaatggcgggttgcgccatcctgatgactatcgcactcgctctgttggaacagctcccgtggatgtcctacctttcaatcgtagcgatcttcgggtttgtggccttcttcgaggtgggaccagggcctatcccatggttcatcgtggccgagctgttttctcaagggccccgccctgcagccatcgctgtagctggattctctaactggactagtaatttcattgtcggaatgtgcttccaatacgtcgaacagttgtgtgggccgtacgtgttcattatctttaccgtgctcctggtcctctttttcatctttacctactttaaggtgccggaaacgaagggccggaccttcgatgagatcgcctcgggttttcggcaaggaggcgcctcgcagtctgataagacgcccgaagaactgttccacccgctgggagccgactcccaagtg

SEQ ID NO: 251216 - DNA, 1476 bp, synthetic construct
  misc_feature 1..1476: note = Description of Artificial Sequence: Synthetic coding sequence
  source 1..1476: mol_type = other DNA
atggagccttcgtcaaagaagctcaccggacgcttgatgctggcggtgggaggcgcagtgctgggctcgctccagttcggatacaacactggcgtgatcaatgccccgcagaaggtgatcgaagaattctacaatcaaacctgggtgcatcggtacggagagtccattctgccgactaccctcaccactctttggagcctgtcagtggcgatcttttctgtgggagggatgatcggatcattctcggtgggactcttcgtgaaccgcttcgggcggagaaattcaatgcttatgatgaatctgctggcatttgtctccgcagtcctgatgggcttctccaaacttggaaagagcttcgagatgctcatccttggacgcttcatcatcggcgtgtactgcggactcaccaccggattcgtccccatgtacgtgggggaagtgtcaccgaccgcactgagaggagctctgggaaccctgcaccagcttggaatcgtggtcggaatcttgatcgcgcaggtgtttggattggattcgatcatgggaaataaggacctctggccgctcctgctctctatcattttcatcccggcattgttgcagtgcatcgtgctgccgttctgtccggagtcccctcgctttttgctgatcaaccgcaatgaagagaatcgggctaaatcggtcttgaaaaagctcaggggaactgcggatgtgacccatgacctccaggaaatgaaggaggagtcaagacagatgatgcgcgagaaaaaagttaccatcctcgaactcttccgatcgcccgcttacagacagccgattctcatagcagtggtgctccagctgtcacagcagttgtccggaatcaatgccgtgttctactactccacctcgatcttcgaaaaggcaggagtgcaacagccagtttacgccaccatcgggagcggaatcgtcaacaccgccttcactgtggtatctctgttcgtcgtcgagcgggctggacgcaggactctccatcttatcgggctggccggcatggccggatgcgccatcctgatgaccatcgcgttggccctcctggaacaacttccttggatgtcgtatctgtcgatcgtggccatcttcggattcgtggccttcttcgaagtgggacctggaccaatcccatggttcattgtggccgaacttttctcacaaggcccgcggccagctgcaattgcggtcgcaggcttctcgaactggacctcgaactttatcgtgggcatgtgtttccagtacgtggagcagctttgcggaccatacgtgttcatcattttcactgtcctcctcgtgctcttctttatcttcacttactttaaagttcccgaaactaagggaaggacctttgacgaaatcgcctccggatttcgccaagggggagcaagccaatccgacaagactccagaagaactgtttcaccccctgggggcggactcccaggtg

SEQ ID NO: 251217 - DNA, 1476 bp, synthetic construct
  misc_feature 1..1476: note = Description of Artificial Sequence: Synthetic coding sequence
  source 1..1476: mol_type = other DNA
atggagccttcctccaagaaactgactggccgcctcatgttggctgttggaggggcagtgctgggatctcttcagttcggctacaacaccggggtgatcaacgcgccccagaaggtgatcgaggagttctacaatcaaacttgggtgcatcggtatggtgagtcaatcttgcctactactctgacgaccttgtggtccctgtccgtggcgattttctcggtcggagggatgatcggatctttcagcgttggattgttcgtgaacagattcggacgccggaattcgatgctgatgatgaatctcttggcttttgtgtctgccgtgctgatgggattctccaagctcggaaaatcatttgaaatgctgatcctgggtcgctttatcattggagtctactgtggccttaccactggattcgtgccaatgtacgttggagaagtctcaccgaccgccctgcgcggagcactcggcactctgcaccagctcgggatcgtggtaggaatcctgatcgcccaagtgtttggactggacagcatcatgggtaacaaggacctgtggccgctgttgctgagcattatctttatccctgccctcctccagtgtatcgtgctcccgttctgcccggaaagcccacggttcttgctgattaatcgaaacgaggaaaaccgagcgaaaagcgtgcttaagaaacttcgcggaaccgcagatgtgactcacgatctgcaagaaatgaaagaagaatcacggcagatgatgcgggagaagaaagtgaccatcctggagttgttcaggtcccctgcctaccggcagccgatcctcattgcggtcgtcctgcaactgtcccagcagttgtccggaatcaacgcggtcttttactacagcacctcaattttcgagaaagcgggagtgcagcaaccagtgtacgcgaccatcggttccggcattgtgaataccgctttcaccgtcgtctccctgtttgtggtggaaagagcaggccggcgcaccctgcacctgatcggtctggccgggatggccggatgtgctatcctgatgactatcgcgctggccctcctggagcaactgccatggatgtcctacctctcgatcgtggcaattttcggcttcgtagcgttcttcgaagtcggcccgggaccgatcccctggtttatcgtggccgagctcttctcacagggacctagaccagcggcaatagcggtggccgggttttctaattggacttcaaactttatcgtcggaatgtgcttccagtacgtggaacagctctgtggcccatacgtctttatcatattcaccgtgctgcttgtccttttcttcatcttcacttacttcaaggttccggagactaaggggcgtacgttcgatgaaatcgcgtccggatttcgccagggtggagcatcgcaatccgacaagactccggaagaattgtttcatcccctcggtgccgattcacaagtg

SEQ ID NO: 251218 - DNA, 1476 bp, synthetic construct
  misc_feature 1..1476: note = Description of Artificial Sequence: Synthetic coding sequence
  source 1..1476: mol_type = other DNA
atggaaccttcgtccaagaagctcacaggaagactcatgttggctgtcgggggcgccgtcctgggctctctgcaatttggctataacactggagttatcaacgcccctcaaaaggttatcgaggagttctacaaccaaacatgggtgcatcggtatggagagagcattttgcctactacactgactaccctgtggtctctgtctgtggcgatctttagcgtggggggcatgatcggcagctttagtgttggactctttgtgaaccggttcggaagaagaaattcaatgctcatgatgaacctgcttgcctttgtgtccgcagtattgatgggctttagcaagctaggcaagagcttcgagatgctgatcttgggccgcttcataatcggggtgtattgtgggctgaccactggcttcgttcctatgtacgtcggggaagtgtctccgaccgctctgcggggagctcttgggacgctccaccagttgggaatagtggtaggcatcctaatagcccaggtctttggtctggacagcattatgggtaacaaggatctgtggccactgctgctgagcattatctttataccagcactcctgcagtgcatagttctccctttctgccccgaaagtccaagatttctccttatcaataggaatgaagaaaacagggctaagtcagtgcttaagaagctgagaggcaccgctgatgttacccatgaccttcaagagatgaaagaagagagccgccagatgatgagagaaaaaaaggtgaccattctggagctcttcagatcgccagcgtaccggcagcctattctcatcgcggtggtcctgcaacttagccaacagctgtcgggcatcaacgcggtgttctactatagcacttctatctttgagaaagctggcgtccagcagccggtctacgcaaccattgggagtgggattgtgaacaccgcgttcaccgtcgtttctctgttcgttgttgagagggctggaagacgtaccttgcatttgataggcctggcgggcatggcgggctgcgctattttgatgactatcgctctggctttgctggagcagctgccctggatgtcctacctgagcattgtggcaatcttcggtttcgtggcattttttgaggtcggacctggaccgattccctggttcatcgtagcggagctcttttctcagggcccccggccagcagcgatagccgtcgcgggcttttcaaattggacaagcaactttatagtgggcatgtgtttccaatatgttgagcaactctgtggaccctatgtattcataatctttacagtattattggtccttttttttatattcacctatttcaaggtgcctgagaccaaaggaaggacctttgatgagatcgcctcgggctttagacaaggcggtgcctcccagagcgataagactcccgaggagttatttcatccactgggcgcagatagtcaagtg

SEQ ID NO: 251219 - DNA, 1476 bp, synthetic construct
  misc_feature 1..1476: note = Description of Artificial Sequence: Synthetic coding sequence
  source 1..1476: mol_type = other DNA
atggagcctagtagcaaaaagctgaccggcaggctgatgctcgcagtcgggggtgccgtcctggggtctctgcagttcggctataatacaggagttattaatgcccctcagaaagtcatagaggagttctacaaccagacctgggtgcatcgatatggcgagagtatccttccgaccactttgacgacactttggagcctgagcgtagcaatctttagcgtaggcgggatgattggatctttcagtgtggggctgttcgtcaatagatttggcagacggaactcaatgctgatgatgaatctactggctttcgtgagcgctgttctgatggggttctctaagctcgggaagtctttcgagatgttaatcctgggtcgcttcatcattggcgtgtactgtggcctgacaactggattcgttcctatgtacgtcggggaagtttcccccactgccctgcgaggagcactgggtactctgcatcagttaggcatcgtagtggggattctaattgcacaggtgttcggactcgacagtatcatgggtaataaggatctgtggcctttgctcctctcaattatttttattccagccctcctccagtgtatagtgttgccattctgtcccgagtccccaaggttcctgctaatcaataggaatgaggagaaccgagccaagtccgtgctcaagaagctacgtgggactgcagacgttacacacgacttgcaggagatgaaggaagaatctcgacagatgatgagggagaagaaagtgaccattctggaactgttcaggagtcctgcctatcgacagccaattttaatagcagttgtgttgcaactgtcgcagcagctgtccggcatcaacgcagtgttctactacagtacctcgatattcgaaaaagctggcgtgcagcagcctgtgtacgctactattgggagtggcatcgtgaacaccgcttttacagtggttagtctgtttgtcgttgaacgcgccggcaggcgaactctgcacctcattggactcgccgggatggcaggttgtgccatcttgatgactatcgcactcgcgctacttgagcaacttccttggatgagctatctgagtatcgttgccatttttggttttgtggcattcttcgaggtgggtccggggccaatcccatggttcatcgttgcagagctcttttcccagggcccgagacccgccgccatcgcagtcgccggcttctccaattggaccagtaactttatcgtcggaatgtgttttcaatacgtggagcagctgtgcgggccatatgtgttcataatcttcactgtccttcttgtcctgtttttcatattcacgtacttcaaggtaccagagaccaagggccggactttcgacgagattgcatcaggctttagacagggcggagcaagccaaagcgacaagacgcctgaggaactgtttcatccactaggggccgactcacaggtg

SEQ ID NO: 251220 - DNA, 1476 bp, synthetic construct
  misc_feature 1..1476: note = Description of Artificial Sequence: Synthetic coding sequence
  source 1..1476: mol_type = other DNA
atggaaccctcgtctaagaagctgacaggccgactgatgctcgccgtgggcggcgctgttctagggtcactccagtttggttataacactggtgttataaacgcccctcaaaaggtgatagaagagttttataaccagacatgggttcaccgctatggcgaatctatcctccctaccacgctgactacactgtggtcattgagcgtcgctatattctccgtcggtggcatgataggttccttctctgtaggattgttcgtgaaccgattcggtcgaaggaactccatgctaatgatgaatttactggcttttgtgtcagctgttttgatgggcttctctaagttgggtaagtcgtttgagatgcttatccttggcaggttcattataggcgtctattgtggtctcactacaggattcgtgccaatgtatgtgggcgaggtgagccctacagctctgcgaggcgctctcggaacacttcatcagctaggtatcgtcgtgggaatacttatagcccaggttttcggcctggactccattatgggtaacaaagatttgtggcctttactgctatctataatattcattcctgctctgctccagtgcatagtccttcccttttgcccagagtcgcccagattcttattgatcaacagaaacgaagaaaacagagccaaatcggtcctgaaaaaactcagaggaactgctgacgtaacccatgacctgcaggagatgaaggaagagagcagacagatgatgcgagaaaaaaaggtgacaattcttgaactcttcagatctcccgcttatcgtcagccaatccttatcgctgtggttctgcagctgtcgcagcaactgtctggaatcaatgccgtcttttactactccacatccatcttcgaaaaggctggagtgcaacagcctgtgtatgctacaatcgggagcggcattgtgaacacagcctttacagtggtgtcactctttgtcgtggagcgggccggccgacgaactctgcatttgattggactagccgggatggctggatgtgctatcctcatgactatcgccctcgcgctcctcgaacaactgccttggatgtcatacctatctatcgttgcaatttttggcttcgtcgctttcttcgaggtggggccaggacctattccatggttcattgttgccgaactgttttcacagggacccaggccagccgctatcgctgttgccggctttagcaactggacgtcaaactttattgtagggatgtgttttcaatacgtcgagcaactgtgtgggccttatgtgttcatcatattcacagttctgctggtcctgttctttattttcacctacttcaaagtccccgagaccaagggcaggacatttgacgaaattgcaagcggcttccgacaaggcggcgcgagccagtcagacaaaaccccggaagagttgttccaccccctcggcgcagatagtcaggtg

SEQ ID NO: 251221 - DNA, 1476 bp, synthetic construct
  misc_feature 1..1476: note = Description of Artificial Sequence: Synthetic coding sequence
  source 1..1476: mol_type = other DNA
atggaaccttccagcaaaaaacttaccggacggctcatgcttgcagtggggggtgctgtgctgggaagccttcagttcggctacaacaccggtgtgataaatgcgcctcaaaaagtgatcgaagaattctataatcaaacttgggtgcataggtacggtgaatcaatacttcctactaccctcactacgctttggagcctctccgtggccatcttttctgtgggaggaatgataggatcattctcggtcggactctttgtgaaccgttttggtcgccgaaactccatgctgatgatgaatcttctcgcttttgtgtcagccgttctgatgggtttctccaagctcgggaagtccttcgagatgctcatcctcggacgcttcattatcggcgtctactgtggacttaccaccggattcgtgccgatgtacgtgggcgaagtgagccctaccgcactgagaggtgcactgggcacccttcatcagctgggaattgtcgtcggaatcctgatcgcccaggtgttcgggctggactcaatcatgggtaataaggatctgtggcctctgctgctttccatcatattcatacccgcacttctccaatgtattgtgcttcctttttgtcccgaatcgccgcgatttcttctcattaaccgcaacgaggagaacagagcaaagagtgtcctgaaaaaacttaggggtaccgcggacgtaactcatgatctgcaggagatgaaggaagagtcccgacaaatgatgcgagaaaagaaagtgaccatcctggaactgttccggtcgccggcataccggcagccaattcttatcgcagtcgtcctgcaactgtcccaacaactctcgggcatcaacgccgtgttttactactccacttcgattttcgaaaaagccggagtgcaacaacctgtgtacgcgaccatcggatcgggtatcgtgaataccgccttcactgtggtgtcgctcttcgtggtcgagagagcaggccggcgtacccttcatctgattggcctggcaggaatggctggttgcgcaattctgatgaccatcgcactcgcccttcttgaacaacttccttggatgtcgtacctgagcattgtggccatatttggtttcgtggcttttttcgaggtcggacccggtccaataccatggtttattgtggctgaacttttttcgcagggacctcgcccagcggcgatcgctgttgcaggattttcgaactggactagcaactttattgttggtatgtgctttcaatatgtcgagcagctgtgtgggccatatgtctttatcatattcacggtgctgctggtgctgttctttatcttcacctactttaaggtgccagaaaccaagggtcggacttttgatgagatcgcgagcggattccgacagggaggagcatcacaaagcgacaagacgcctgaggaactgttccacccacttggagcagattcccaggtg

SEQ ID NO: 251222 - DNA, 1476 bp, synthetic construct
  misc_feature 1..1476: note = Description of Artificial Sequence: Synthetic coding sequence
  source 1..1476: mol_type = other DNA
atggagccgtcctccaagaagctcaccggtcggttgatgctggcagtcggcggtgctgtgcttggctcactacagtttgggtacaacactggggtcataaacgcccctcagaaggttatcgaggagttttacaatcagacctgggttcatcggtatggagaaagcatcctgccaaccactctgacgaccttgtggtccctgagcgtagccattttcagcgtgggagggatgataggctccttttccgttgggttgttcgtgaacaggttcggcagacggaactcgatgctcatgatgaacctgctggcattcgtgagtgccgtcttaatgggatttagcaaactggggaaatcattcgagatgctaatactggggaggtttattatcggtgtatattgtggattgacaactggcttcgtgccaatgtacgtaggagaagtctcgccgaccgcattgaggggagcccttgggactttacatcagctgggtattgtcgtgggcattctgattgctcaagtctttgggctggactcgatcatgggcaataaagatctgtggccgttgctactgagcatcatattcatccccgctctcttacagtgcattgtgttgcctttttgtcccgagagtccccgttttctcctgattaatagaaacgaagaaaaccgcgctaagtccgtgctaaagaagctcagaggtactgccgacgtgacccacgatctgcaagagatgaaggaggaatcaaggcaaatgatgagggagaagaaggttaccattctcgaactgttcagatcacctgcgtacaggcagccaattctcatcgctgtagtcctgcagctgtcccagcaactcagcggcataaatgcagtattttactattctacaagcatcttcgagaaagcgggcgttcagcagccagtgtacgccacaattggcagcgggatcgtcaacacagcatttaccgtggtgagtctctttgtggtggaacgcgcgggaagaagaactctgcacctgattggcctcgccggaatggccgggtgcgctattcttatgactattgccctggctctgttagagcagttgccttggatgagctacttgtcaatcgtcgccattttcggctttgtggccttctttgaggtcggccccggccccattccctggtttatcgtcgccgagctattttcccagggacccagaccggctgccatagcagttgccggctttagcaactggactagcaatttcatagtgggtatgtgcttccaatacgttgaacagctatgtggcccttacgttttcatcatcttcacagtcctcttagttttattctttattttcacgtattttaaagtccctgaaacaaaggggcggacctttgacgagatagcttccggctttcgtcaagggggtgcatcccagagcgataagactccagaagaattatttcatcccctcggtgccgatagtcaggtt

SEQ ID NO: 251223 - DNA, 1476 bp, synthetic construct
  misc_feature 1..1476: note = Description of Artificial Sequence: Synthetic coding sequence
  source 1..1476: mol_type = other DNA
atggagccctctagtaagaaattgactgggcgattaatgctagccgttggaggggccgtgcttggctcactccagttcgggtataacactggtgtgatcaacgcaccccagaaagtgattgaggagttttataaccagacttgggtacacaggtacggggaaagcatccttcccactaccttaacgacactttggagcctttctgtggcaatcttctccgtggggggcatgatagggtcttttagtgtcggcctcttcgtcaacagatttgggagaagaaacagcatgctgatgatgaatcttctcgcctttgtgtccgctgtgcttatggggttcagtaagcttggtaagagtttcgagatgctaattcttggccgatttatcataggtgtgtactgcggccttacaacgggattcgttcccatgtatgtcggagaggtgagtcccacggctttaaggggtgctctcggaaccttacatcagttggggattgttgttggcatcctcatcgcccaggtttttggactggacagcatcatgggtaacaaggatctttggcccctcctgctcagcattatcttcatcccagcccttctccagtgtatagtgcttcctttctgtcccgagagtccacggttcctactcatcaaccgcaacgaagagaaccgcgccaaaagcgtcctcaagaagcttagagggactgccgacgtgacccatgatctccaagaaatgaaagaggaatcgcggcaaatgatgcgcgagaagaaagtaaccatcttagaactgttccgcagcccggcctatcggcagcccatcctgattgccgtcgtgctccagctgtcccagcagctgagtggcatcaatgccgtgttttattatagtacttccatcttcgaaaaggctggggtccaacagccagtgtacgctaccatcggcagtggcatcgttaatacagcttttacagtggtgtctctatttgtggtcgagcgagcgggccgtagaaccctccacttaattggacttgccggcatggcgggatgcgccattttgatgactattgctctggccctgttggagcagttgccatggatgagttacctgtcaatcgtagccattttcgggtttgtagctttcttcgaggtgggacctggacccatcccttggtttatcgtggcagaactgtttagccagggtccacgcccagctgcaattgccgtggctggcttctctaattggacatcgaatttcatcgtaggaatgtgttttcaatatgtagagcaactgtgtggcccttatgtcttcataatcttcacagtcttactagtgctattcttcatttttacttactttaaggtcccagagactaaggggcgcaccttcgatgagatcgctagcggctttcgacaggggggggctagccagagcgataaaacccccgaggagttatttcacccgttgggggccgacagccaggtg

SEQ ID NO: 251224 - DNA, 1476 bp, synthetic construct
  misc_feature 1..1476: note = Description of Artificial Sequence: Synthetic coding sequence
  source 1..1476: mol_type = other DNA
atggaaccttcctctaagaagctgaccggaaggcttatgctggcagtcggaggggctgtcctcgggtcgcttcagttcggatacaacactggcgtgattaacgcgccacaaaaggtcatagaagagttctacaatcagacctgggtacatcggtacggagagagcatcctgcctacgactctcaccaccctgtggtcactctcggtcgcaatcttctcggtcggcggaatgatcggatcctttagtgtgggacttttcgttaaccggtttggccgccggaactccatgctcatgatgaacttgctggctttcgtttccgcggttttgatgggcttctctaaactgggaaagtcattcgagatgctgatccttggtcgattcatcatcggtgtgtattgcggactgactaccggattcgtgccgatgtacgtgggggaagtgagccctaccgccttgcggggagcccttggaactctgcaccagctgggtatcgtggtgggcatcctcatcgctcaagtgttcggcctggactcgataatgggaaacaaagatctgtggccgctgctcctgtccatcatcttcatcccggcattgctgcagtgtatcgtgctccctttctgcccagaatcgccgcggttcttgttgattaacagaaatgaagagaatcgggcgaagagcgttttgaaaaagctgcgcggtaccgccgacgttacccatgatcttcaagaaatgaaagaagagtcacggcaaatgatgagagagaagaaggtgacgatacttgaactcttccgaagcccggcctatcgtcagccaattctcatcgccgtagtactgcagctgtcccagcagctgagcgggatcaacgcggtgttctactacagcacttccatattcgaaaaggccggagtgcaacagcccgtctatgctacgatcggctcaggaattgtgaatacggcattcactgtcgtgtccctcttcgtggtggagagggccggccgccgcactctccacctgattggattggctggaatggcggggtgcgccatcctcatgactatcgcgctcgcattgctggaacaactgccttggatgtcgtacctgtccatcgtcgccatctttggatttgtggccttcttcgaagtgggaccaggaccaattccgtggtttatcgtggccgagttgttctcccaggggccaagacctgcggccattgcagtcgcgggtttcagcaactggacctccaatttcatcgtcggaatgtgttttcaatacgtggagcagctgtgcggtccgtacgtgtttatcatctttaccgtcctgcttgtgctgttctttatctttacctacttcaaagtgccggaaactaagggtagaaccttcgacgagatcgcatcggggttcagacagggcggtgcctcacagagcgataagactccggaagagctgttccacccgctgggagccgactcgcaagtg

SEQ ID NO: 251225 - DNA, 1476 bp, synthetic construct
  misc_feature 1..1476: note = Description of Artificial Sequence: Synthetic coding sequence
  source 1..1476: mol_type = other DNA
atggagccctcaagcaagaaacttaccgggcgcctgatgttggcagtgggcggcgcggtgctgggctccctgcagttcggttacaatactggagtgatcaacgccccgcaaaaagtcatcgaggaattctacaaccagacctgggtgcatcggtacggggaatcgatcctgccaacgacccttaccaccctctggagcctgtcagtcgcaatcttttcggttggaggaatgatcggctccttttccgtgggcctctttgtcaacagattcggacgccgcaactcgatgctgatgatgaatctcctggcgttcgtgtcagcagtgctcatggggttttccaaacttggaaagtctttcgagatgctgatcctgggtcgcttcatcatcggggtctattgcggtctgactaccggcttcgtgccaatgtacgttggtgaagtatccccgaccgcgttgaggggagcgctgggcactctccatcagctggggatcgtcgtgggaatcctgatcgctcaggtcttcgggcttgactccatcatgggaaataaagacttgtggccgctgctgctgtcgatcatcttcatccctgcgttgttgcaatgcatcgtgctgccgttctgtcccgaatcccctcgctttcttctgattaatagaaacgaagaaaaccgggccaagtcggtcctcaagaaactcagaggaaccgccgatgtcacgcacgacctgcaggaaatgaaggaagagagccgccaaatgatgcgggagaagaaggtgactattctcgagctgtttagatcacctgcctaccgccagccgatcctgatcgcagtggtgctgcagctgtctcaacagctgtccggaatcaatgctgtgttctactattccacttcgatatttgagaaggcgggtgtgcagcagcccgtctacgcgaccattgggtcgggcatcgtgaataccgccttcaccgtggtgtcgctcttcgtagtggaacgggccgggcggcgcactctgcacctgattggcctcgccggtatggcaggctgcgctatcttgatgaccatcgctcttgccctgttggaacaactgccatggatgagctacctgtcaatcgtggccattttcggattcgtggccttcttcgaagtggggccgggaccaatcccgtggtttatagtggcggaactgttcagccagggaccacgcccagccgccattgccgtggcaggattctctaactggacgtcgaactttatagtgggcatgtgcttccaatacgtggaacagctgtgcggaccgtacgtcttcatcatcttcactgtgctgctggtgctcttcttcatcttcacttactttaaagtgcctgaaaccaaaggccgcactttcgatgaaatcgcgagcggcttccgccaaggaggggcgtcgcagtccgataaaactccggaggaacttttccatccgctgggagccgactcgcaggtg

SEQ ID NO: 251226 - DNA, 1476 bp, synthetic construct
  misc_feature 1..1476: note = Description of Artificial Sequence: Synthetic coding sequence
  source 1..1476: mol_type = other DNA
atggagccatctagcaaaaaactgaccggtcgtctcatgctggccgtcggaggagccgtcctagggtccctgcaatttggatacaatacaggcgtcattaatgcacctcagaaagtgattgaagaattttacaaccagacatgggtgcatagatatggtgaaagcatacttcccactaccttgaccaccctgtggtcactgtctgttgcaattttttccgttggcggcatgatcggatctttttccgtggggctattcgttaataggtttgggaggaggaattccatgctgatgatgaatctgcttgcattcgtgagtgcagtgctgatgggtttctctaagctgggtaagagcttcgaaatgttaatactggggcggtttattatcggggtctactgcggcctaacaacaggcttcgtcccaatgtatgttggcgaggtgagcccaaccgcactgcgcggcgcactgggcacactacaccagctcggcatcgttgtcgggattcttatagcacaagtgttcgggctagattcaatcatgggtaacaaagacctctggcccctgctcttatctattatatttataccagctttgctgcagtgtattgttctgccattctgtcccgagagccctcgcttcttactaatcaaccgaaatgaggaaaacagagctaagagcgtgctgaagaagttaaggggcaccgctgatgtgactcacgatctgcaggagatgaaagaagagagccggcagatgatgagagagaagaaggtgacaatactggaactctttaggtccccagcttataggcagcccattctgattgccgttgtcctgcaacttagccagcagctatctggcataaacgccgtcttttactacagcaccagcattttcgagaaggctggcgtgcaacagcctgtgtacgcaacaatcggatctggcatcgtgaacaccgctttcacagtagtgtctctctttgtggttgagcgggccggaagacgcaccctccatctgatagggctagctggcatggccgggtgtgcaatcctcatgaccatcgccctagctctgttagagcagctgccatggatgtcatacctgtccatagtagctatctttggctttgtggcattttttgaagttgggcccgggcctatcccttggtttatagtggcagagctgttcagccaaggacctcgccccgcagctatagcagtggctggcttctccaactggacttcaaacttcattgtgggcatgtgtttccagtatgttgagcagctgtgtggaccttacgtgtttattatctttactgtcctgctagtgctctttttcatttttacttactttaaggttccagagacaaaggggcgcaccttcgatgagattgcttctggctttcgtcaggggggagcttcccagtccgacaagaccccagaggaattatttcaccctctgggcgcagatagccaggtg

SEQ ID NO: 251227 - DNA, 1476 bp, synthetic construct
  misc_feature 1..1476: note = Description of Artificial Sequence: Synthetic coding sequence
  source 1..1476: mol_type = other DNA
atggaaccttcgagtaaaaaattgactgggagactcatgcttgccgtgggaggggccgtgttggggagcttgcagtttggatacaacactggggttataaacgctcctcagaaggtgatcgaagaattctataatcagacatgggttcatcgttacggcgagtcaatcctccccacgacactaactacactgtggagcctctccgtggcaatcttctctgtgggtggtatgatcgggagcttctccgtcggcctgttcgtgaataggttcgggcggaggaattctatgttgatgatgaacctgctggccttcgtttccgcagttctgatgggattttcgaagctcgggaaaagtttcgagatgcttattctgggacgtttcattattggggtctactgtggactaactacaggatttgtgcccatgtatgtcggggaggtcagcccaacagctctgcgaggcgccctgggcactcttcaccaactaggaatcgttgtggggattctcatcgcccaggtgtttggcctggactctattatgggtaacaaagatctgtggccactgcttctgtcaatcatatttattcctgctctcctccaatgcattgtgctgcccttctgtcccgagtcacctcggttcctcctcatcaacagaaacgaggagaatcgcgcaaaaagtgttctcaaaaagctccgggggactgcagatgtcactcacgacctgcaggaaatgaaggaggagtccagacagatgatgcgggaaaaaaaggtgacaattctggaattatttagaagcccagcctatcgccagcccatcctcatcgccgtggttttacagctcagccagcaactcagtgggattaatgcggttttttactatagcacatctatctttgagaaagcgggggtccagcagcccgtctacgcgaccattggctctggcattgtcaatacagcttttaccgtggtgtccctctttgtagtcgagagggccggtcgtagaacattgcacctgatcggccttgcaggcatggcgggatgtgcaatccttatgaccattgcccttgccctgctcgaacagctgccctggatgagttatctgtctatcgtggccatctttggcttcgtcgctttttttgaggtggggccaggacctatcccctggttcatagtggcggaattgttttctcaaggacctcgtccagctgctatagccgtcgcaggattctcgaattggacctcaaactttatcgtgggcatgtgcttccagtatgtagagcaactctgtggcccgtacgtgtttatcatcttcacagttctgctcgttctcttctttatcttcacatacttcaaggtccccgaaactaaaggaagaacctttgatgagatcgcctccggcttccgacagggcggcgcctcacagtctgataagacacctgaggaacttttccaccctctcggggcagactcacaggtg

SEQ ID NO: 251228 - DNA, 1476 bp, synthetic construct
  misc_feature 1..1476: note = Description of Artificial Sequence: Synthetic coding sequence
  source 1..1476: mol_type = other DNA
atggaaccaagctcgaagaagttgactggccgcctgatgctcgcggtcggcggagcagtgctcggttcgctgcagttcggctacaatactggcgtgataaacgcgccgcagaaggtgatcgaggagttctataaccagacctgggtgcaccgctacggcgaatccattctccccacgaccctgactaccctctggtcactgagcgtggcgatcttctctgtcggtggcatgattgggtcgttttcagtgggtctgttcgtgaaccgcttcgggagacggaatagcatgctgatgatgaatctgcttgcctttgtgtcggcggtgctgatgggcttttcgaagctcggaaaatccttcgaaatgctgatcctcggacggttcatcatcggagtctactgcggactgacgaccggtttcgtgccgatgtatgtgggcgaagtctccccaaccgccctccggggcgccctgggtactctgcaccaactcgggatcgtggtcggcattctgatagcccaggttttcgggctggactcgattatgggaaataaggacctttggccactgttgttgagcatcattttcatccctgccctgctgcagtgcatcgtgctgcctttttgcccggagtctccaaggttcctgctcatcaacagaaacgaggagaaccgggccaaatccgtgctgaaaaagttgcggggaactgccgatgttacgcatgatcttcaagagatgaaggaagaatcgcgccaaatgatgcgggagaagaaagtcaccatcctcgaactcttccggagcccagcctaccggcagccgatcctcatcgcagtggtcctccagctttcccagcaactctctgggatcaatgcagttttctactactcgactagcatcttcgagaaggcgggagtgcaacagccggtctacgccactatcggatcggggattgtgaacactgcattcaccgtggtgagcctgtttgtggtcgaacgggcgggaaggcggaccctgcatctcatcggactcgccggaatggccggatgtgcaatcttgatgactatcgcattggcgctgttggaacagttgccgtggatgtcctacttgtccatcgtggccatcttcggattcgtggcgtttttcgaggtgggaccaggtccaatcccttggtttatcgtcgctgaactcttctcacaaggaccgcgcccggcagctatcgctgttgccggattctcgaactggacttccaacttcatcgtgggcatgtgttttcagtacgtcgaacagctctgcgggccctatgtgtttatcatcttcaccgtgcttctggttctgttcttcatcttcacgtacttcaaggtgcctgagactaaaggacgaacctttgacgaaatcgcatctggatttcggcagggcggagcatcccaaagcgacaagaccccggaagaactgttccaccctctgggtgcggatagccaagtc

SEQ ID NO: 251229 - DNA, 1476 bp, synthetic construct
  misc_feature 1..1476: note = Description of Artificial Sequence: Synthetic coding sequence
  source 1..1476: mol_type = other DNA
atggagccctcatccaagaaactcaccggtcggctgatgcttgccgtcggaggcgccgttttgggatcgcttcagttcggatacaacactggcgtgatcaacgctcctcagaaggtcattgaagaattctacaaccagacctgggtgcatagatacggagagtccatcctgcccaccaccctgactaccctctggtcgctgtcggtggccatcttctcagttgggggcatgatcgggtccttttcggtgggcctctttgtaaacagattcggacgccggaattccatgctcatgatgaatctcctggctttcgtcagcgccgtgttgatgggcttttccaagctcggaaagtctttcgaaatgctcatactcggaaggttcatcatcggggtctactgtggactcactaccgggtttgtcccaatgtacgtgggagaagtgtcgccaaccgcgctcagaggagctctgggaactttgcaccagctcgggatcgtggtcggaatacttatcgcgcaagtgttcggactggactcaataatgggaaacaaggatctctggccgctgcttctttcgatcatctttatcccggctctgctgcagtgtatcgtgttgccattctgccctgagtccccgaggttcctccttatcaaccgcaatgaggaaaaccgcgctaagtccgtcttgaagaagctgcggggtaccgcagatgtgacccacgacctccaggaaatgaaagaagagtcaagacaaatgatgagggaaaagaaagtcaccatactcgagctcttccgctcgccggcctacagacaaccaattctgatcgccgtcgtcctgcagttgtctcaacagctcagcggaatcaacgcggtcttttactacagcacgtcgatctttgagaaggccggcgtccaacagcctgtatatgccactatcgggagtggcatcgtcaatactgccttcaccgtcgtctccctgttcgtggtggagagggccgggagacgcactctgcacctgatcggcctcgcgggaatggcgggatgcgccatcctcatgactatcgccctggcgcttctggaacaactcccctggatgagctacctgtcaatcgtggcaattttcggcttcgtggccttcttcgaagttggaccgggcccaatcccgtggttcattgtggctgaactgttctcccaaggaccgcgccctgccgcgattgcagtggcgggattctcaaactggacctccaatttcatcgtgggaatgtgtttccagtacgtcgagcagctttgcggtccatacgtgtttatcatctttacggtgttgctggtgctgttcttcatcttcacgtacttcaaagtgccggagactaaagggcgtaccttcgacgaaatcgcttcgggattccggcaaggcggggcgagccagtcggacaagacccccgaggaactgtttcatccgctgggcgcggattcgcaggtg

SEQ ID NO: 251230 - DNA, 1476 bp, synthetic construct
  misc_feature 1..1476: note = Description of Artificial Sequence: Synthetic coding sequence
  source 1..1476: mol_type = other DNA
atggaaccctcctcgaagaaactgaccggacgcctgatgctggctgtgggaggcgccgttctcgggtccctgcaattcggctacaatactggagtgattaacgcgccgcagaaagtgatcgaggagttctacaatcaaacgtgggtgcaccggtacggcgaatcaatcctccccactaccttgacgactctctggagcctgtcggtggccatctttagcgtgggtggaatgatcggttccttctcagtcggcctcttcgtgaatcgcttcggacggcggaactccatgttgatgatgaatcttttggcgttcgtgagcgcggtgttgatgggattttcaaagctgggaaagtccttcgagatgctcatcttgggaaggtttatcattggtgtgtactgtggactcactaccgggttcgtcccgatgtacgtgggggaagtgtcgcctaccgcactccggggcgcgctcggtactcttcaccagctcggaatcgttgtgggcatcctcatcgcccaagtgttcggactggatagcattatggggaataaagatctgtggccgctgcttctgtcgatcattttcatcccggctttgctgcagtgtatcgtcctcccattctgcccggaatcaccgcgcttcctcctgatcaataggaacgaggagaatcgcgctaagtctgtcctcaagaagctgcggggaactgccgacgtcacccacgacctgcaggaaatgaaggaagagagccgacagatgatgcgcgagaagaaggtcaccatcttggaacttttcaggtcacccgcctaccggcaacctatccttatcgccgtggtgctgcagctctcacagcagctgtcgggaattaacgccgtgttttactacagcacttcaatctttgagaaggccggagtccagcaacctgtctatgccactattggttcagggatagtgaacaccgcctttaccgttgtgtcgctgtttgtggttgaaagagccggacgcaggaccctccatcttataggcttggcagggatggctggttgtgcgatcctcatgaccatcgcgcttgcgctcctcgagcagctcccatggatgtcgtacctctcgatcgtggcgatctttggcttcgtggcgttcttcgaagtgggtccaggcccaatcccgtggttcatcgtggcggaactgttctcacaaggtccgcgcccggcggcgatcgcggtcgcaggtttttcgaattggacctcgaacttcattgtgggcatgtgttttcaatacgtggagcaattgtgcggaccgtacgtgttcatcatctttactgtgctcctggtcttgtttttcatcttcacgtacttcaaagtcccagaaaccaagggaagaacgttcgacgagatcgcctctggattcaggcagggaggtgcctcccagtccgataagaccccagaggaactgttccatccgctgggtgcagactcccaggtc

SEQ ID NO: 251231 - DNA, 1476 bp, synthetic construct
  misc_feature 1..1476: note = Description of Artificial Sequence: Synthetic coding sequence
  source 1..1476: mol_type = other DNA
atggagccttcatcaaaaaagctcaccggtcgcctgatgctggcagttggaggcgccgtgctcggcagtcttcagttcggttataataccggagttattaatgccccccagaaggttattgaggagttctacaaccaaacatgggttcaccgctatggagagagcattctgccgactacattgacaactctgtggagtttgtccgtcgccattttctctgtcggcggtatgatcggaagtttctcagtgggacttttcgtgaacagattcggcagaaggaattctatgctcatgatgaacctgctggcgtttgtatccgctgttttgatgggcttcagtaagttgggcaagagtttcgagatgctgattttgggaaggtttatcattggtgtgtattgcggcctgaccactggcttcgtccctatgtacgtgggagaggtgtccccgacagctttgcgcggagccctcggaactctccaccaattgggcatagtcgttggaatcctgatcgctcaagtattcggtctcgattctatcatgggtaacaaggatctctggcctctgcttctgtccatcatcttcattcccgcgctgcttcagtgcatcgtgttgcctttttgcccagagtccccaaggttcctgctgattaacaggaatgaagagaatcgcgctaagtccgtcctcaagaagttgcgcggaacggcagatgtgactcatgacctgcaagagatgaaggaagagtctcgccaaatgatgagagagaaaaaggtcactattctggaactgttcaggtccccggcttaccgccagcccattttgatcgctgttgttctgcagcttagtcagcaactttctggtattaatgcagtgttttactacagtacaagcatcttcgagaaagctggagtgcagcagccggtatatgccacaattggaagcggcatcgttaatacagccttcaccgtcgtgagcctgtttgtggtagaaagggctggtaggagaacccttcacttgatcggcctggccggtatggctggttgtgcgattctgatgacgatcgccctggcacttctggaacaactgccatggatgtcttacctgtccattgtcgctatattcggatttgtcgcgttcttcgaggtgggacccggtcctattccgtggtttatcgtcgctgaactcttctcccagggacctcgcccagcggctatcgccgtcgctggcttctctaactggacttccaatttcatagtgggcatgtgtttccagtacgttgagcaactgtgcggcccttatgtgtttattatcttcaccgtgttgcttgtgttgttcttcatattcacctatttcaaggtccctgaaacaaagggaaggaccttcgacgagattgcttcaggctttaggcagggcggtgcttctcaatctgataaaacaccagaggagctgttccaccctctgggcgcggacagtcaggtg

SEQ ID NO: 251232 - DNA, 1476 bp, synthetic construct
  misc_feature 1..1476: note = Description of Artificial Sequence: Synthetic coding sequence
  source 1..1476: mol_type = other DNA
atggagcccagttcgaaaaaactgacgggccgcctgatgctggcggtaggaggcgccgtcctcggatccctccaatttgggtacaacactggggttatcaatgctccccaaaaggttatcgaggagttctataatcagacctgggtgcatcgctatggcgagtctatcttgcctactacccttaccaccctgtggtctctatcggtggccattttttccgttgggggcatgatcggatctttttccgtgggacttttcgtaaatagattcggccggaggaacagcatgctgatgatgaacctactggcctttgtaagcgccgtcctgatgggcttctccaaactgggcaagagcttcgaaatgcttatactcggaagattcataatcggggtgtattgtggcctgaccacaggtttcgtgcctatgtacgtgggagaggtctctcccaccgcactccgaggagccttgggaacccttcatcagctcggcatcgtagttgggatattgatcgcacaagtctttggtctggatagtataatgggcaataaagacctgtggccacttcttttaagtattatctttattcccgccctactgcagtgtattgtcctgcctttttgtcctgagagcccaagattccttctgatcaacaggaacgaagaaaaccgagcgaagtctgtcctaaaaaagctccgtggaaccgctgatgtcacacacgatctgcaggaaatgaaagaagaaagccggcagatgatgagagaaaagaaggtcacaatactggaactttttcgctcccccgcatacaggcagcccattttaatcgccgtagtgttgcagctgtcacagcaactgtcagggatcaacgccgtgttctattactctacgtcaatattcgagaaggctggcgtgcagcagccagtttatgcgactataggatctggaatcgtgaataccgctttcaccgtcgtgtccctgttcgttgtggagagagcaggccgtcgtaccctccatttgattggcttggctgggatggcaggctgtgctattctgatgacgatcgctctcgctctgctggagcagctcccctggatgtcatacctgagtatcgtcgccatctttggctttgtggcatttttcgaagttggaccaggcccgatcccatggtttatagtggccgaactgttcagccaaggccctcggcctgcagccatagccgtcgccggtttctcaaactggacatccaacttcatcgtaggaatgtgctttcagtacgttgagcagctttgtgggccctatgttttcattatttttaccgtgcttttagtgctcttctttatttttacctatttcaaagtgcctgagactaaagggagaaccttcgacgagatcgccagtgggttccgtcaaggtggggcgagtcagagtgacaagacgccagaagaactcttccatcctctgggcgctgactcacaggtt

SEQ ID NO: 251233 - DNA, 1476 bp, synthetic construct
  misc_feature 1..1476: note = Description of Artificial Sequence: Synthetic coding sequence
  source 1..1476: mol_type = other DNA
atggaaccctcctcgaaaaagctgacggggcggctcatgcttgccgtaggaggggcggtcctcgggtctctacaatttggatataataccggggtgataaacgcgccgcagaaggtcatagaggagttttataaccagacctgggtacacagatacggggaatcaatcctgcccaccaccctgaccaccttgtggtccctgtcggttgctatcttttccgtcggcggtatgataggcagtttcagtgtgggcctgtttgtaaaccgctttggtcgcaggaatagcatgctgatgatgaacctgctagcattcgtaagtgcagtgctgatggggttctccaaactcgggaaaagttttgagatgctaatcctgggcagatttatcatcggggtatattgcgggctgacaactggctttgttcccatgtatgttggtgaagtgagccccactgcactgagaggagctctcggtaccctgcaccagttgggaattgtagtgggaatcctgatcgcacaggtcttcggactggattctatcatggggaacaaggacctctggccgctcctcttaagcatcattttcattcctgccctcctgcagtgcatcgtcctgccattctgtccagagagcccacggttcttgctaatcaaccggaatgaggaaaatcgcgcaaagtccgttctgaagaagttgcggggcacggcagacgtcactcacgacctgcaagaaatgaaggaagagtctaggcaaatgatgcgagaaaaaaaagtgacaatacttgagctatttcggagtcccgcttatcgtcaacccatactgattgccgtcgtgcttcagttaagccagcagctttctggtatcaatgcagtcttctattactcgacttcaatcttcgagaaggccggagtccagcagcccgtgtatgctacgatcggtagcggaattgtcaatacagctttcacggtagtgtcactgtttgtggtcgaacgagccggccgtcgtacccttcacttgatcggtctggccggcatggcaggctgcgctatcctgatgacaatcgctctggccctgcttgaacagttgccttggatgagctatctcagcatagtcgccatattcgggtttgtcgcgttctttgaagtaggcccgggacccatcccatggtttatcgtggctgagctcttctcccaagggcctagacccgctgcaatcgcggtggcgggattcagtaactggactagcaacttcatagtaggaatgtgcttccagtatgtagagcaactgtgtggaccatatgtgtttataatcttcaccgtgctgctggtgcttttcttcatcttcacctattttaaggtgcctgagacaaagggtcggacatttgatgaaatagcttccgggttcaggcaaggcggcgcttcccaaagcgacaaaactcccgaagagctgttccacccactaggcgctgattctcaggtt

SEQ ID NO: 251234 - DNA, 1476 bp, synthetic construct
  misc_feature 1..1476: note = Description of Artificial Sequence: Synthetic coding sequence
  source 1..1476: mol_type = other DNA
atggaaccgtccagcaagaagctcactggacgtctcatgctggcggtcgggggcgcagtgttgggatccttgcagttcgggtacaacactggagtgataaatgcacctcagaaagtgatcgaggaattctacaaccagacgtgggtgcacagatacggagagtcaatcctgcctacgaccctcaccaccctgtggtccctgtctgtcgcgatcttctcagtcggcggaatgataggatcgttcagcgtcggattgttcgttaaccgcttcgggcgaagaaactcgatgttgatgatgaaccttttggctttcgtcagcgccgtgctcatggggtttagcaagctcggcaagtcatttgagatgctcatcctgggtcgcttcatcataggagtgtactgtgggctgaccaccggatttgtgccgatgtacgtgggcgaggtgtcgcctactgctctgcggggtgcccttggaacccttcaccaactgggaattgtcgtgggtatcctgattgcccaggttttcggactcgattcaatcatgggaaacaaggacctctggccactcctgctttccatcatcttcattcctgcccttctgcaatgcatcgtgttgcccttttgcccggagtccccaaggttcttgttgattaatcggaacgaggaaaatagggcgaagagcgtactgaagaaactccggggaaccgcagatgtcactcatgacctccaagagatgaaagaagagagccgccagatgatgcgggagaaaaaggtgactattcttgaactctttcgctcgccggcgtacagacagccgatcctcatcgcagtggtgctgcagctctctcagcagctcagcggaatcaacgcggtcttttactactcaacctcgatcttcgagaaggccggggtgcagcagccggtctacgccactatcggatccgggatcgtcaataccgcttttactgtggtgagcttgttcgtggtggaacgcgccggacgacggacgctgcacctgataggcctcgcaggtatggcagggtgcgccattctgatgactattgcccttgctttgctggagcaattgccatggatgtcgtacctgtccatcgtggccattttcggatttgtggccttcttcgaagtggggccgggccccatcccatggtttatcgtcgcagaattgttctcacaaggcccacgcccggccgccatcgcggtcgcaggattctcgaactggacttccaatttcatcgtcggtatgtgcttccagtatgtggaacaactgtgcggcccatatgttttcattatcttcactgtgctgctggtgctgttcttcatcttcacctacttcaaggtgccggaaaccaaaggacgcacgttcgatgaaatcgcatccggattcagacagggtggggcgtcgcagtctgacaagacgccagaagaattgtttcatcctctgggtgctgatagccaagtc

SEQ ID NO: 251235 - DNA, 1476 bp, synthetic construct
  misc_feature 1..1476: note = Description of Artificial Sequence: Synthetic coding sequence
  source 1..1476: mol_type = other DNA
atggaaccatcatccaaaaagctcaccggcaggctcatgcttgcggtgggaggcgccgtgctcggttcacttcagttcggctataacacaggggtcatcaacgcccctcagaaagtcattgaagaattctataaccagacctgggtgcacagatacggagaatccatcctgccaacaactctgaccaccctgtggtccctttctgtggccatatttagtgtcggcgggatgattggttcattttctgtcggcctgtttgttaataggttcggccgcaggaactctatgttaatgatgaacctcctggctttcgtcagcgcggtgctgatgggattctctaaactgggaaaaagtttcgagatgcttattctgggtcgctttataataggcgtgtattgtggacttactaccggcttcgtacccatgtatgtcggtgaagtcagccccacagccctgagaggtgccctcgggaccctgcaccaactcggaatcgtagtgggtatcctgatcgcgcaggtatttgggctggacagcatcatggggaataaagatctttggcctctcctgttgtcaattatttttattccagcactgttgcagtgtatcgttctgcccttttgtcctgaatccccacggttcctgctgatcaaccgcaatgaagagaatagggcaaagtcagttctcaaaaagttgcgcgggacagccgacgttacacacgacctccaggagatgaaagaagaatcccgccagatgatgcgcgaaaaaaaagtcacaatccttgaactgtttcggagtccagcctatcgccagccaatactaatcgctgtggtgttacaactgagccagcagctgagcggaatcaacgctgtgttttactattcaactagtattttcgaaaaggctggggtccagcagccagtctatgcaactatcggaagtggaatagtcaacaccgcatttactgtcgtgagcctgttcgtggtggagcgggctggtcgccggacgctccacctgattgggctcgctggtatggcgggatgcgctatcctgatgactattgctctagctctcttggagcaactaccttggatgtcttacctaagcatcgtggccattttcggctttgtggcctttttcgaggttgggcctgggcctatcccttggttcatcgtagcagagctcttttctcaaggcccacgtccagcagcaatcgccgtggccggattctctaactggactagtaattttatagttgggatgtgctttcaatacgtcgagcagctctgcgggccgtacgtgttcattatttttactgtgcttctggtactgttcttcattttcacatacttcaaggttcctgagaccaaagggcggacattcgatgagatcgcaagcggctttcgccaggggggcgcttcccagagcgataaaacacccgaagaattgttccatcctctaggcgcggattcccaggtc

SEQ ID NO: 251236 - DNA, 1476 bp, synthetic construct
  misc_feature 1..1476: note = Description of Artificial Sequence: Synthetic coding sequence
  source 1..1476: mol_type = other DNA
atggagccaagctcgaagaagctcaccgggagacttatgctggcagtcggaggggccgtacttgggtcacttcagtttggttataacaccggagtgataaacgcacctcaaaaggtcatagaggaattctacaatcagacttgggttcacaggtacggagagtccattctccctaccacccttactaccctgtggagtctctcggtggccatcttcagcgtgggagggatgataggctccttttcagtgggtttgtttgtgaatcggtttggtagacgcaattctatgctgatgatgaaccttctggccttcgtctcggcagtgctcatgggattttcgaaactgggcaagagctttgaaatgctcatcctcggcagattcattatcggagtgtactgcggactgactaccggattcgtgccaatgtacgttggggaagtgagccccactgccctgaggggagcacttgggactcttcatcaactcggaattgtggtgggtattcttatcgcgcaggtctttggacttgattcaataatggggaacaaagacctctggccgctgttgctgagcattatctttattcccgcactcctgcaatgtattgtattgccattttgtcctgaaagccctcgtttcctcttgatcaatagaaacgaagaaaaccgggccaagtccgtcctgaaaaagctgcggggaactgcggatgtcacccacgacctgcaggagatgaaggaagagtcgcgtcaaatgatgcgggaaaagaaggtgaccattctggagctgttccgatccccggcatataggcagccaattcttattgcagtggtccttcaactgtcacagcaactttcaggtataaacgctgtgttttactactccacgtccatctttgagaaggcaggtgtccagcagcctgtgtacgcaactattggttccggcatagtaaataccgcatttactgtcgtgtcgctgttcgtcgtagaaagagcaggcagacgcacgctgcatctgattggactcgccggtatggcggggtgcgcaattcttatgaccatagcactggcactgcttgaacagttgccatggatgtcgtacttgagcatcgtggcgattttcggatttgtggctttctttgaagtgggacctggccccatcccctggttcattgtggccgaattgttttcgcaaggtcctcgtccagccgcaatagcggttgcaggcttctcaaactggacctccaactttatagtgggtatgtgttttcaatacgtcgagcaactttgtggaccgtacgttttcattatctttactgtgcttcttgtgctgtttttcatcttcacgtactttaaggtgcctgagactaaagggcgcacctttgatgaaatcgcctcgggttttcgccaagggggcgcttcccagtctgacaaaactcccgaagaactctttcatccccttggtgcagattcgcaagtg

SEQ ID NO: 251237 - DNA, 1476 bp, synthetic construct
  misc_feature 1..1476: note = Description of Artificial Sequence: Synthetic coding sequence
  source 1..1476: mol_type = other DNA
atggagccttcctcgaaaaagctcactggccggttgatgttggcagtgggtggagcagtgcttggatcgctccagttcggttataataccggggttatcaatgccccacaaaaagtcattgaggaattttataatcaaacatgggtccacaggtatggagagtcgattctacctaccacacttactaccttgtggtcgctatctgttgccattttctccgtcgggggcatgatcggttctttctccgtcggtctgtttgtgaatcgtttcggacgccgcaactccatgctgatgatgaacctcttggccttcgtctcagcagtgctgatgggattctctaagctcggcaagtcttttgaaatgctaatactgggccgatttattatcggcgtgtactgtggcctcactaccggattcgtccccatgtatgttggagaagtgagtcccactgccctccgaggcgctcttggaacactccatcaacttggtattgtggtcggtattttgattgcgcaagttttcggtctggattccatcatgggcaataaagacctctggcctttgttgctgtcgatcatttttatcccagcccttctacaatgcatagtgctcccgttttgtccagagtcccctagattcctcctgataaatcggaatgaggagaaccgagccaagtcggttttgaaaaagttgagaggaactgcggatgtcactcacgacctccaggaaatgaaagaagagtcccgacagatgatgagggagaagaaggtcacaatcttggagctattccgcagccccgcgtatcgccagcctattctgattgcagttgtcttacagctctcacagcaacttagtggaataaacgctgtcttctactattccacatctatttttgagaaagcgggcgtccagcagcctgtgtatgctaccattggaagtggtatcgtcaatacggccttcacggttgtttctctctttgttgttgaacgagcggggcgccgaactctccatttgatcggactggcgggaatggccggctgtgccatcttgatgacaatcgctctcgccctcttggagcaattgccatggatgtcctatttgtctatagttgccatatttggattcgtggccttttttgaggttggccccggtccgatcccatggttcatcgtggcagagttattctctcagggtcccaggccggcagcgatcgctgtcgcggggttctcgaactggacaagcaattttatagtaggtatgtgcttccagtatgttgagcaactatgcggaccttatgtcttcattatcttcactgtgctcttggttctcttcttcatttttacctacttcaaggtacccgaaaccaaggggcgtacctttgatgagattgcaagcggcttcagacagggtggcgcgtctcagtcagacaaaacgccagaagaactatttcatccgcttggtgcggatagtcaggta

SEQ ID NO: 251238 - DNA, 1476 bp, synthetic construct
  misc_feature 1..1476: note = Description of Artificial Sequence: Synthetic coding sequence
  source 1..1476: mol_type = other DNA
atggagccaagttccaagaagcttacaggacgccttatgctggccgtggggggcgccgtccttgggagcctccagttcggatacaacacaggcgtgatcaatgcacctcaaaaggttatcgaagagttctacaaccagacttgggtgcataggtatggcgagtctattctacccactactctgaccactctgtggagtttgtctgtagcaatcttcagcgtcggcggcatgattggttctttttctgtgggcctctttgtaaacagattcggcagaaggaactctatgctcatgatgaatctgctcgcctttgtgagcgcggtgttgatgggtttctctaaactcggcaagtccttcgagatgttaatactgggccgtttcattataggagtgtattgcggactcaccacagggttcgtgcccatgtatgtaggtgaggtgtcacctacggccctgagaggagccctgggaactctgcaccaactgggcatcgtggtgggaatcctgatcgcccaggtattcggactggattctattatgggaaataaagacttatggccactcctcctgtcaatcattttcatccccgctctcctccagtgcattgtcctgcccttctgccccgaaagcccacgctttctgttaatcaatcggaatgaggagaacagggctaagagcgtgctcaagaagttaagaggtaccgctgacgtaacgcacgacttgcaagagatgaaggaggaatcccgacaaatgatgagggaaaagaaggtgactatcctggagctgttcaggtccccagcctataggcagcctatacttattgctgtcgttcttcagctgtctcaacagttgtctggaattaacgccgtcttctattatagtaccagtatatttgagaaagctggagtgcagcaacctgtgtacgcgaccatcggctccggcatagtaaacaccgcttttaccgtggtctccctgttcgtggtggagcgagccgggcgccgcactcttcacctcattggacttgctggaatggcaggatgcgcaattcttatgacgatcgctctggcgttgctggagcagctgccatggatgtcctacctcagcattgtcgcgatctttggatttgttgcattctttgaagtcggcccgggacctatcccctggttcatcgttgccgaactttttagccagggcccacgccctgcagcgattgcggtcgccggcttcagcaactggacaagtaattttatcgtaggcatgtgttttcagtatgttgaacagctgtgcggcccctatgtgtttataatcttcactgtcctgcttgttctgttttttatctttacttattttaaagtgccagagaccaagggacgcaccttcgatgagattgcgtccggcttccggcaaggcggggcctcacagtccgacaagacacccgaagagctgtttcaccccctgggggcagattcccaggtg

SEQ ID NO: 251239 - DNA, 1476 bp, synthetic construct
  misc_feature 1..1476: note = Description of Artificial Sequence: Synthetic coding sequence
  source 1..1476: mol_type = other DNA
atggaaccctcatctaagaagcttacgggccggctgatgttggctgtgggtggtgccgtcctgggttccctacagttcggctataacaccggagtcatcaacgctccgcagaaagtcatcgaagaattctacaaccagacatgggtacatcggtatggcgagtccattttgccaaccaccctcaccacactttggagcctcagtgttgccatcttctctgtaggcggcatgattgggtcgttctcggtaggcctgttcgtgaatcgtttcggcaggcggaacagcatgctgatgatgaacctccttgcctttgtatccgctgtcctcatgggattttctaagctgggaaagtctttcgaaatgcttattctgggccggttcattataggcgtctattgtggactgactactgggtttgttcctatgtacgtcggagaagtttcccccactgccctgcgaggtgcactggggaccctccaccagcttgggatcgtcgtaggcattctgatcgcccaggtctttgggcttgatagtatcatggggaacaaagatctgtggcccctgctgctctcaattatattcatcccggcccttcttcagtgcattgtgttgccgttttgtcctgagagcccacggtttcttctgatcaacaggaatgaggaaaacagggcaaagtcggtgctgaagaaactgcggggaaccgccgacgtgacccacgatttgcaggagatgaaagaggagtcacgacagatgatgagagaaaagaaggtcacgatactcgagctttttaggtcccctgcctaccgtcaaccaatcctgatcgctgttgtgctgcaactcagccaacagctatcgggaataaatgctgtgttctactattccaccagtatctttgaaaaggccggcgtacagcagcctgtgtacgctaccataggcagtggaatcgtcaacaccgctttcacagtcgtctccctattcgttgtcgagcgcgctggccggagaacattgcacctgattggactggctggaatggccggctgtgcgatcctgatgaccatagctctcgcattgctagagcagcttccatggatgtcatatctcagtatcgttgccatctttgggttcgtggcctttttcgaggtgggcccgggccctatcccatggttcatagtggcggagttgttcagccagggaccgcgtccggcagcgatcgccgtggcaggctttagcaactggacttctaacttcatcgttggcatgtgtttccagtacgtggagcagttatgcggcccctacgtttttatcatctttaccgtactgcttgtgttgttcttcatctttacatatttcaaagtccccgagaccaaggggagaacattcgacgagatcgcatctgggttccgccaaggcggagcatcccagtcagacaagacccctgaagagctgttccaccctcttggtgcagattcgcaggtg

SEQ ID NO: 251240 - DNA, 1476 bp, synthetic construct
  misc_feature 1..1476: note = Description of Artificial Sequence: Synthetic coding sequence
  source 1..1476: mol_type = other DNA
atggaaccatcatccaaaaagctcaccgggcggttgatgctggctgtgggaggcgcggtcttgggttcactccaattcggatacaacaccggagtgattaatgcaccccagaaagtgattgaggagttttacaatcagacttgggtgcatcgctacggagaatcaattctgccgaccacgcttactactttgtggtcgctgtccgtagccatctttagtgtcggaggaatgatcggttccttttccgtgggactttttgtcaacagatttggtcgcagaaactctatgctgatgatgaatctccttgcattcgtgagcgcagtgctgatgggattttcaaagctcggtaagtcctttgaaatgcttatccttggcaggtttatcataggggtgtactgtggtttgaccactggatttgtccccatgtacgtgggggaagtgagccctaccgcacttaggggtgccctcggcaccctgcaccagcttgggatcgtggtgggtatcctgatagcccaggtctttggacttgattcaatcatgggaaacaaagacctctggcccttgttgctgtcaataatctttattcctgcactcctgcagtgcatcgtgcttcccttttgtccagaaagcccacggtttttgttgattaaccgcaacgaagaaaatagagcaaagtctgttcttaagaagctgcgtgggaccgccgatgtgactcacgaccttcaggagatgaaagaagaatcgcgccaaatgatgagagagaagaaggtcacgattctcgagctttttagatccccagcttacagacaacccattctgatagcagtggtcctgcagctttcgcaacagctgtctggcatcaacgcagttttctactactccacctcgatatttgaaaaggccggtgtccaacaacctgtctacgccactattggctccggcattgtgaatacggctttcactgtggtgagcctgttcgtggtagagcgagcaggtcggcgaactctccatttgataggtcttgcagggatggcgggatgcgctattctgatgaccatcgcacttgctctcttggagcaactgccttggatgtcatatctcagcattgtcgcaatcttcggatttgtggcattctttgaagtggggcctggtcccattccctggtttattgtggcggaattgttctcgcaaggacctagacctgcggcaattgcagtggccggattttccaactggacttccaactttatcgtaggaatgtgtttccaatacgttgagcaactgtgtggtccatatgtgttcatcatattcaccgtgctgcttgtcctctttttcatcttcacttactttaaggtcccggaaactaagggcagaacctttgacgaaattgcttccggattcaggcaaggaggagcctcccagtccgataaaactcctgaggaactctttcatccacttggcgcagattcgcaggtc

SEQ ID NO: 251241 - DNA, 1476 bp, synthetic construct
  misc_feature 1..1476: note = Description of Artificial Sequence: Synthetic coding sequence
  source 1..1476: mol_type = other DNA
atggagccaagctcgaagaagcttactggcagactgatgctcgcagtgggcggagccgtgctggggagtctgcagttcggctataacactggcgtgatcaacgccccccaaaaggtcatagaggagttttacaaccagacttgggttcaccgctatggggaaagcatccttcccacaaccctgaccactctgtggtcactgtcggtagcaatcttcagtgtcgggggcatgattgggtcattttctgttgggctctttgttaatagatttgggcgcagaaattccatgctgatgatgaacctgttggccttcgtgtccgcggttctgatggggttctctaagctgggcaagagttttgaaatgctgatcctgggacgatttattatcggggtctactgcggacttacaactggctttgtgccaatgtatgtgggagaggtcagtccaacagcccttcggggcgccctgggcactctgcatcagttggggattgtcgtgggaatcctgattgcccaggtgttcggtctggactcaataatgggcaacaaagatctctggccccttctgctttcaatcatctttatccctgcgctcctgcagtgcatcgttctcccattttgtcccgagtccccacgcttcctgctcatcaaccgaaatgaggaaaacagggcaaagtctgtgttaaagaagctaaggggtaccgcagacgtaactcacgacctgcaggaaatgaaggaagaatctaggcagatgatgagagagaagaaggttactatcctggaactcttccgtagccccgcataccgtcagcctattctgatcgccgtcgtgctgcagctctcacagcagctgagcggaattaatgcagtgttttactatagtacttctatctttgaaaaagcaggtgtgcagcagcccgtgtatgccactataggatctgggatcgtgaatactgcgttcacggttgtgagcctgttcgtggtggagagggcggggagaagaaccttacatctaatcggcctcgctggcatggccgggtgtgcaatcctgatgaccatcgcactggccctcttagaacagctgccctggatgagttacttgtctattgtggctatctttggcttcgtggcttttttcgaggtggggccgggacccattccttggttcatcgtggcagagcttttctctcagggacccagacccgcagcgattgcagtcgccgggttctctaactggacgagtaactttatcgtggggatgtgtttccagtacgtagaacaactttgcggaccatatgtgttcatcattttcaccgtcctgcttgtcctgttcttcatcttcacttatttcaaagtgcccgaaacaaagggtcgtactttcgatgagattgcctctggattccgccagggaggcgccagtcagagtgataagactcccgaagaactcttccacccgcttggagcggattctcaggtc

SEQ ID NO: 251242 - DNA, 1476 bp, synthetic construct
  misc_feature 1..1476: note = Description of Artificial Sequence: Synthetic coding sequence
  source 1..1476: mol_type = other DNA
atggagccatcttcaaagaagttgaccggacgtctgatgctcgccgtcggcggagccgtcctggggtcactgcagttcgggtacaataccggagtcatcaacgctccccagaaggtcatcgaagagttctataatcagacctgggtgcatagatatggagaatcgatcctgccaactactctgacgaccttgtggagcctgtctgtggctatcttctcagtgggagggatgatcggttcgttctcagtcggtcttttcgtgaaccgcttcggacgcagaaactcgatgctgatgatgaacctcctcgcctttgtttcagccgtcctgatgggattctcgaagctggggaagtcgtttgagatgctgatcctcgggcggttcatcattggcgtgtactgtggtttgaccaccggctttgtgccgatgtacgtcggcgaggtgagcccaactgcccttagaggtgccctcggaactcttcaccaactcggaatcgtcgtggggatcctgatcgcccaggtgttcggactcgattctatcatgggaaacaaagacttgtggcccctgctgcttagcattatcttcatcccggcgctgctccagtgcattgtcctgccgttctgccctgaatcgccgcggttcttgctgatcaatcgcaatgaggaaaatcgcgccaagtcggtgctgaaaaaactgaggggcaccgctgatgtgacccatgatctgcaagagatgaaggaagagtcccgccagatgatgcgggagaaaaaggtgacgatcctcgagctgttccgctccccagcctaccgccagccgatcctcatcgcagtggtgctgcagctctcccagcaactcagcggtataaacgctgtgttctactattccactagcatcttcgagaaggccggcgtgcaacaacctgtttacgcaactatcggatccggaattgtgaacactgccttcaccgtcgtcagcctgtttgtggtggaacgggcgggacgccggaccctgcatctgatcggcctggcaggaatggccggttgcgcaatcttgatgacgatcgccctggccctgctggaacagttgccttggatgagctacctgtcgattgtggcgatttttggctttgtggctttctttgaggtgggtccgggaccgattccgtggtttatcgtggccgaacttttttcgcaaggacctaggcctgcagcgatcgcggtggccggcttcagcaactggacttccaacttcatcgtggggatgtgcttccagtacgtggagcaactgtgtggtccttacgtgtttatcatctttactgtcctgctcgtgctgttctttatcttcacctactttaaagtccctgagactaaggggcgcaccttcgatgaaatcgctagcggatttcggcagggaggagcctcacagtcggacaagacccccgaggagctcttccatccattgggtgccgactcccaagtc

SEQ ID NO: 251243 - DNA, 1476 bp, synthetic construct
  misc_feature 1..1476: note = Description of Artificial Sequence: Synthetic coding sequence
  source 1..1476: mol_type = other DNA
atggagccttcgtctaaaaagcttacagggaggcttatgctggccgtgggcggcgccgttctcggcagcttgcagttcggctacaatacaggtgtgattaatgctccacaaaaggtcatcgaagagttttataatcaaacttgggtgcaccggtacggcgagtccattctgcctaccacactaacaactctgtggagcctctctgtagccatattttctgtgggggggatgatcggctcgttctccgtgggcttgtttgtgaatagattcggtagaaggaactcgatgcttatgatgaatttactggcctttgtcagcgcggtgctgatggggttttcaaagttgggcaagtcattcgaaatgttgatccttggcaggttcattataggcgtgtattgcggactgaccactggatttgtcccgatgtatgtgggcgaagtatccccgactgcccttcgaggtgccctgggaaccttgcatcagctcggaatcgtggtaggcatactcattgcacaggtgtttggcctagatagcataatgggcaacaaagatctgtggcctctccttctcagcatcatcttcatacccgcacttctgcagtgtattgtccttccattctgccccgagagcccccgttttctactaattaacagaaacgaggagaacagggcaaagagcgtactgaagaaactgagaggaactgccgacgtgactcatgatttgcaggagatgaaggaagaaagccgccagatgatgcgagagaaaaaagtcacgatcctggagcttttcagatcccctgcctaccgccagcctatccttatagccgttgtcttacagctcagtcagcagttgtcaggcatcaacgcggtcttctactacagcacaagcatatttgagaaagcaggagtgcagcaacctgtgtacgcaaccatcggctcaggtatcgtgaacaccgcatttacagtggtctctctgtttgtggttgaacgtgcaggtagacggacacttcatttaatcggcctggctggaatggcaggatgtgcaatattaatgacaatcgctctcgctttgcttgagcagttgccttggatgtcatatctctcaatcgtggccattttcggattcgtggctttttttgaggtcggaccaggacctataccgtggttcatagttgctgagctgtttagtcagggccccagaccagccgctattgcagtggcaggcttttctaattggacttctaattttattgtgggcatgtgtttccaatacgttgagcagctgtgtggaccctatgtcttcattatattcaccgtgcttctagtcctgtttttcatttttacttacttcaaggtacctgagactaagggccgcacatttgatgagatcgcctcagggttccgccagggcggggcatcccagtcggataaaacaccggaggagctcttccacccgttgggagcagactctcaggtg

SEQ ID NO: 251244 - DNA, 1476 bp, synthetic construct
  misc_feature 1..1476: note = Description of Artificial Sequence: Synthetic coding sequence
  source 1..1476: mol_type = other DNA
atggaaccaagtagtaaaaaactaacaggacgactgatgctcgctgtcggaggagccgtgctagggagtctgcaattcgggtataacacaggggtgatcaacgccccacagaaggtaattgaagaattctataatcagacttgggtccaccggtatggggagtccatcctgcctacaacactcacaacactctggtcgctctctgttgcaatattttccgttggagggatgatagggtcatttagtgtaggactttttgtgaataggttcgggcgccggaattcaatgttaatgatgaatcttttagcatttgtaagtgctgtgttaatgggattctcaaaactcgggaagagttttgagatgctgatcttgggacggttcatcatcggggtctactgtgggctgactacaggattcgtacccatgtatgtcggagaagtgtcgcccacggccttaagaggagcactcggaacattacaccagctggggattgtggttgggatactaatagcacaggtgttcgggctcgatagtatcatgggaaataaggatctatggcccctcctgctttctatcatattcatccccgccctcctccagtgtatagtcttaccattctgtcccgaatctccacggtttctcctcatcaacaggaacgaggaaaatagagcaaagtccgtcctgaaaaaattacggggaactgcagatgtgactcacgatcttcaggaaatgaaagaagaatcacggcaaatgatgcgggaaaaaaaagtgactatacttgaactttttagatcacctgcttataggcagcccatacttatcgccgtagttctacagctgagtcagcaattatctggaatcaacgctgtgttttactattccacttcaatatttgagaaagcgggggttcagcagcctgtgtacgcaacaattggatcaggaatcgtaaacactgcctttacagttgtatctttatttgtggtggagcgcgccgggagacgaactctccatctcatcgggctcgcaggaatggccggatgtgctatattgatgacgatcgcacttgccctactcgaacagctcccctggatgagttacctttcaatcgtcgctattttcggattcgtggcctttttcgaagttggaccaggaccaatcccatggtttatcgtcgccgaactcttttcacagggacctagacccgccgcaatcgcggtggctgggttctccaactggacatcaaacttcattgttgggatgtgtttccagtacgtagagcagctctgtggaccttatgtatttataatctttacagttctgttagtgttgttcttcatcttcacatattttaaagtgcctgaaacaaaagggaggacattcgatgaaatagcctctggatttaggcaggggggagcctctcagtcagacaaaacacccgaagagttatttcatcctctaggggctgattctcaggta

SEQ ID NO: 251245 - DNA, 3591 bp, synthetic construct
  misc_feature 1..3591: note = Description of Artificial Sequence: Synthetic coding sequence
  source 1..3591: mol_type = other DNA
atgctgtggtgggaggaggttgaggattgctacgagagagaggacgtgcagaagaagacattcactaagtgggtgaatgcccagtttagcaagttcggtaagcagcacatagaaaacctgttttcagacctgcaagacggtaggaggctgctggacttgttagaaggcctgactggacagaagctgccaaaagaaaagggaagcacccgagttcatgcgctcaacaacgtgaataaagcgctgcgagtgctgcagaacaataatgttgatctagtgaatataggctccactgatatagtggacggcaaccacaagctgaccctcggacttatctggaatattatcctgcattggcaagtgaaaaacgtgatgaagaatataatggccggtctccagcagacaaactcagagaagatcctgttgtcctgggtgagacagtccacccgaaattacccacaagtgaatgtcattaactttactacaagctggtcagatggactcgcactcaacgcactgattcactctcatcgacctgacctgtttgattggaatagcgtggtgtgtcagcagagtgcaactcaacggctggagcatgcattcaatatagcaagataccaattgggaatcgagaaactgttggatcctgaagacgttgacacaacctacccagataaaaagtctatcctgatgtacatcaccagtctcttccaagttctgccccaacaggtcagcatcgaagctattcaggaggtggaaatgctgccacggcccccaaaggtgaccaaagaagaacattttcagttacaccaccagatgcactactctcagcagattactgtgtctctagctcagggatacgagagaaccagctcaccgaagccccgattcaagagctacgcctacacccaggctgcttatgtgaccacaagtgacccgactagaagcccattcccctcacagcacctggaagctccagaggataagtcctttggttcttccctcatggaatccgaagtcaatctcgaccgataccagaccgccctggaggaagtgttgtcttggctactgtcagcggaggacacgctacaggcacagggcgagatttcaaacgacgttgaagtggtgaaggaccagttccacacacacgaaggatacatgatggatttgactgctcaccaggggagggtaggaaatatcttgcaactaggaagcaaactgattggaaccgggaaacttagtgaagatgaggagactgaagtgcaagaacaaatgaatttgctgaattcgcgatgggaatgtttaagagtagcaagcatggaaaagcagagtaatctgcacagagtcttgatggacctgcagaaccagaaactgaaggaactgaacgattggctgactaaaactgaggagcgaacacgtaagatggaggaagaaccacttggtcccgatttagaagatctcaagaggcaggtgcagcagcacaaagtcctgcaggaagatctagagcaagaacaggtacgtgtgaactcattgacccacatggttgtcgtcgtcgacgagagtagtggcgaccatgccaccgctgccctcgaagaacaattgaaggtgttgggggaccgttgggctaatatttgccgatggactgaagacagatgggtgctgttgcaggatatattgctgaagtggcaaagacttaccgaagaacagtgcctctttagcgcttggctctcggagaaagaagacgccgtcaacaaaatccataccaccggatttaaggatcagaacgagatgctctcatctctccagaagctcgctgtactgaaggctgatctggaaaaaaagaagcagtctatgggtaagctgtacagtctgaagcaggatttgctttctaccctaaagaataaatcagttactcagaagactgaggcgtggctcgacaatttcgcacgttgttgggacaatctggtgcagaaattagagaagtcgacagcccagatatcccaagccgtgaccacaacccagccgtccctgacacagaccacagtcatggaaactgttacaactgtgactacccgagaacagatcctcgtcaagcatgctcaggaagaacttcccccacctcctccccaaaaaaagcggcaaattaccgtggatacgctcgagcgactccaggagctgcaggaagctaccgacgagttggaccttaaactcagacaagcagaagtcatcaaaggcagctggcaaccagttggcgacttgttgattgattccctacaagatcatctggaaaaagttaaggcgctgaggggggagattgcaccacttaaagagaacgtgtctcatgtgaatgatctggccagacagcttacaaccttggggatccaactcagtccctacaatttgtctacactcgaagacctcaatactcgatggaagttacttcaagtcgcggtggaggatcgagttagacagttacacgaggcacatcgggacttcggccccgcctctcagcatttcctttcaacctccgtgcaggggccctgggagagggcaatctcccctaacaaggtgccctactacatcaaccacgaaacacagaccacctgctgggatcacccaaaaatgacagagctgtaccagagtttggctgatctgaacaacgtccgtttcagcgcgtataggactgccatgaaactgcgcagattacagaaggcactgtgtctcgatcttttgtctctgagcgccgcatgcgacgccctggaccagcataacctgaaacagaatgatcagcctatggatatcctccagatcattaactgtcttacaacgatctacgaccgcttggagcaagaacacaataacctagtgaatgtaccactctgcgtggatatgtgtctgaactggttactcaatgtctacgacacaggacgaaccggaaggattcgggttctctcgtttaagactgggataataagtctttgtaaggcccacctggaggacaagtacagatatcttttcaaacaggtcgcgtcgtctaccgggttttgtgatcagcgcaggctgggactgctgcttcatgattcaatacagatcccgagacagctcggggaagtggccagttttggaggcagtaacattgagcccagcgtgagatcttgcttccaatttgctaacaacaagcctgagattgaggccgctctgtttctcgactggatgaggctggaaccgcagagcatggtatggttaccagtgttgcatagggtggcagctgcagagaccgccaagcatcaagctaagtgcaatatctgcaaggagtgcccaatcattggattccgataccggtctctgaagcactttaattatgacatctgtcagtcatgtttcttcagcggtcgcgtggctaaaggccacaagatgcactatcccatggtggaatactgtacccctaccacgagtggcgaggacgtgcgagactttgctaaagtcctgaagaataaattcagaaccaagaggtatttcgcaaaacacccgagaatggggtacttgccagtgcagactgttctagaaggtgacaacatggaaactgataccatg

SEQ ID NO: 251246 - DNA, 3591 bp, synthetic construct
  misc_feature 1..3591: note = Description of Artificial Sequence: Synthetic coding sequence
  source 1..3591: mol_type = other DNA
atgttatggtgggaagaagtggaagactgttatgaaagagaagatgttcaaaagaaaacttttaccaaatgggtaaatgcacaattttcaaaatttggtaaacaacatattgaaaatttattttctgatcttcaagatggtagacgattattagatttattagaaggtttgacaggacaaaaacttccaaaagaaaaaggttctacaagagttcatgctttaaataatgttaataaggcattaagagtcctacaaaataataatgtcgatttagttaatattggatccactgatattgttgatggtaatcataaattaacattaggacttatctggaatattatattacattggcaagtaaaaaatgttatgaaaaatattatggcaggattacaacaaacaaattcagaaaaaattttacttagttgggtgagacaatcaacacgtaattatcctcaagtgaacgttattaattttacaacatcttggagtgatggattggctcttaatgcattaattcattctcatagaccagatttatttgattggaactcagttgtttgtcaacaatcagctacacaaagattagaacatgcattcaatattgcaagatatcaattaggtatcgaaaaattattagacccagaggatgttgatacaacttatccagataagaaatcaattcttatgtatattacaagtttatttcaagtacttccacaacaagtaagtatagaagcaatacaagaagtcgaaatgttgccaaggccacctaaagttacaaaagaagaacattttcaattacatcatcaaatgcattattcacaacaaattactgtttctttagcacaaggatatgaaagaacatcttcacctaaaccacgattcaagagttatgcttatactcaagctgcttatgttacaacttcagatccaacaagaagtccattcccttcacaacatttagaagcacctgaagacaagtcttttggatcatctttaatggaatctgaagttaacttagatagatatcaaacggctttagaagaggtgctttcatggcttcttagtgccgaagatactcttcaagcacaaggtgaaatcagtaatgatgttgaagttgttaaagatcaatttcatactcacgaaggatatatgatggatttaactgctcatcaaggacgtgttggtaatatattacaacttggatcaaaacttataggaacaggaaaacttagcgaagatgaagaaactgaagttcaagaacaaatgaatcttcttaattcaagatgggaatgtttaagagtcgcttcaatggaaaaacaatctaatcttcacagagtattaatggatctacaaaatcaaaaacttaaagaattaaacgactggttaactaaaactgaagaacgtactagaaaaatggaagaagaaccattaggtcctgatttagaagatttaaaaagacaagttcaacaacataaagttcttcaagaagatcttgaacaagaacaagttagagtaaattctttaacacatatggttgttgttgtagatgaatcatcaggggatcacgctactgctgcacttgaagaacaattaaaagttttaggagacagatgggcaaacatttgtcgatggacagaagacagatgggttttgttgcaagatatacttttaaaatggcaacgactcactgaagaacaatgtcttttttcagcttggttatcagaaaaagaagatgctgttaataaaattcatacaactggttttaaagatcaaaatgaaatgttaagtagtttacaaaaattagcagttttaaaggctgatttggaaaaaaaaaaacaatctatgggaaaattatatagtcttaagcaagatttgttaagtactcttaagaataaatcagttacacagaaaactgaagcttggcttgacaattttgcaagatgttgggataatttagtacaaaaattagaaaaatctactgcacaaatttcgcaagcagtaacaacaacacaaccatcacttactcaaaccactgttatggaaactgtaacaactgttacaacaagagaacaaattttagttaaacatgctcaagaagaattaccacctccacctccacaaaaaaaaagacaaataactgttgatacattagagagattacaagaacttcaagaagccacagatgaacttgatcttaaattgagacaagctgaagttataaaaggaagttggcaaccagttggagatcttttaattgattcattacaagatcatcttgaaaaggtaaaagcattaagaggagaaattgcccctttaaaagaaaatgtatcacatgtaaatgatcttgcaagacaacttactactttaggaatacaattaagtccttataatttatcaaccttagaagatttaaacactagatggaaacttttacaagttgctgttgaagacagagttagacaactccatgaggcacatcgagattttggaccagcatctcaacattttcttagtacatcagttcaaggaccatgggaaagagctatttctccaaataaagttccatattatattaatcatgagacacaaacaacttgttgggaccatccaaagatgactgaactttatcaatcattagcagaccttaataatgttagattttctgcttatagaacagccatgaagttacgtagattacaaaaagctttatgtttggatcttttatcattatctgcagcatgtgatgcattagatcaacataatttaaaacaaaatgatcagccaatggatatacttcaaattattaattgccttacaacaatttatgacagacttgaacaagaacacaataatttagtaaatgtccctctttgtgttgatatgtgtttaaattggcttttgaatgtatatgatacaggaagaacaggtagaattcgtgttttgtctttcaaaactggaattataagtttatgcaaggctcacttagaagataaatatagatatttattcaaacaagtagcttcttcaactggattttgtgatcaaagaagacttggattacttttacatgactctattcaaattccaagacaattgggagaagtggcaagtttcggtggatctaatatcgaaccttctgtaagatcttgctttcaattcgctaataataagccagaaatcgaagcagcattatttcttgattggatgcgattagaaccacaatcaatggtttggcttccagttttacatagagttgctgcagctgaaacagctaaacaccaagctaagtgtaatatttgtaaagaatgtccaattattggattcagatatagaagtttaaaacattttaattatgacatatgtcaatcttgtttcttttcaggtagagttgcaaaaggacataaaatgcattatccaatggtagaatattgtactccaacaactagtggagaagatgtaagagattttgctaaagttcttaaaaataagttcagaactaagagatactttgctaaacatccaagaatggggtaccttccagttcaaacagtattagaaggagataatatggagacagatacaatg

SEQ ID NO: 251247 - DNA, 3591 bp, synthetic construct
  misc_feature 1..3591: note = Description of Artificial Sequence: Synthetic coding sequence
  source 1..3591: mol_type = other DNA
atgctgtggtgggaagaagttgaggactgttacgaaagagaggacgtgcaaaagaaaactttcaccaagtgggtgaacgcgcaattctcaaagttcggcaagcagcatatcgaaaatctcttttccgaccttcaagatggacgcaggctgctggatctcctcgaaggactcaccggccagaaactccccaaagaaaaggggtccacgagagtgcacgcactcaacaacgtgaataaggcactccgcgtcctgcagaacaataacgtggatctggtgaatatcggatcgaccgacatcgtggacggcaaccataaactcaccctgggactgatatggaatatcatccttcactggcaggttaagaacgtgatgaagaacatcatggctggactgcaacagaccaactcagagaaaatcctgctttcgtgggtcaggcagagcacccgcaattacccgcaggtgaacgtgatcaatttcacgacctcgtggagcgacggtctggccctcaacgcgctgatccacagccatcggcccgatctgtttgactggaactcagtggtgtgtcagcagtcagctacccagcggctcgagcacgcgtttaacatcgcgcggtatcagctgggaatcgaaaagctccttgaccctgaggatgtggatactacttaccccgacaagaagtcaatcctgatgtacattaccagcctgtttcaggtgctccctcagcaggtcagcatcgaggccatccaggaagtggaaatgcttcctcggccgccgaaagtgaccaaagaagagcactttcagttgcatcaccaaatgcactactcgcaacagatcaccgtgtcgctggcgcaaggatacgaacgaacctcctcaccgaagccgcggttcaagtcgtatgcctacacccaggccgcctacgtgacgacctccgatccaacccgctccccgttcccatcccaacacctggaagccccggaggacaaatcattcggctcgtccctgatggagtcggaggtgaatctcgatcggtaccaaaccgccctggaagaggtgttgtcgtggctgctgagcgcggaggatactttgcaggctcaaggtgaaatctccaacgacgtggaagtcgtgaaggaccagttccacacccacgagggctacatgatggacctgactgctcatcagggccgcgttggaaatattttgcagctgggctccaagctgatcggcacgggaaaattgtccgaggatgaggagactgaagtgcaggagcagatgaacctgctgaattcacgatgggaatgcctgagagtcgcctcgatggagaaacaatcgaacttgcatcgcgtgctgatggatctgcagaaccaaaagctgaaggaacttaatgactggctcaccaaaaccgaggagagaacccgtaaaatggaggaggaaccgctcggaccggacctcgaagatctgaagcgccaggtacagcaacacaaggtgctgcaagaggacctggaacaagagcaggtccgcgtcaacagcctgactcacatggtcgtcgtcgtggacgagtcaagcggggatcatgccaccgccgctttggaggaacagcttaaggtcctgggcgatcggtgggctaacatctgccggtggactgaggaccgttgggtgctgttgcaggacatccttctcaagtggcaacgcctcaccgaggagcaatgccttttctcagcatggctctccgaaaaggaggatgcggtgaacaagattcacactactggattcaaagaccagaacgaaatgctgagctccctgcagaagctcgcagtgcttaaggccgacctggagaagaaaaagcagagcatgggaaagttgtacagcctgaagcaagacctgctgtcgaccctgaagaacaagtcggtgacgcaaaagactgaggcttggctcgacaacttcgcaagatgctgggacaatctcgtgcaaaaacttgaaaaaagcaccgcccagatttcgcaggcagtcactactactcagccttcgctgactcagaccactgtgatggaaacggtgactaccgtcaccactcgggaacagatcctggtgaagcatgctcaagaggaactcccgccccctccaccccaaaagaagcgccaaatcactgtggacacccttgagcgcctgcaggaactgcaggaagccactgatgaactggatctgaaattgcgccaggccgaagtgattaagggaagctggcaaccggtgggagatctgctgatcgattccctccaggaccacctcgaaaaggtgaaggcccttcgcggcgaaattgctccgttgaaggaaaatgtgagccatgtcaatgacttggcaaggcagctgaccaccctcggtatccagctgtctccgtacaatctctcgacgctggaggacctgaacactcggtggaagctgctccaggtggcggtcgaagatagagtccgccagctgcacgaggctcacagggatttcgggcctgccagtcaacattttttgtccacttcagtgcaaggaccgtgggaaagagccattagtccgaacaaggtgccatactacattaatcatgaaactcaaaccacttgctgggaccacccgaagatgacggaactgtaccaatctctggcggacctcaataacgtcagattctcagcctaccgcactgccatgaagctccgcagactgcaaaaggcgctgtgtctcgatttgttgtccctgtccgccgcatgcgacgcactcgaccagcataatttgaaacagaatgaccaaccaatggacatcctccagatcatcaactgccttaccactatctacgaccggctggaacaggagcacaacaacctggtgaatgttccactctgcgtggacatgtgcctgaattggctgctcaacgtctacgacactgggaggacgggacggatcagggttctgtctttcaagaccggaatcatctccctgtgcaaagcccatctcgaggataaatacagatacctttttaagcaggtggcctcgtcgaccggattctgcgaccagaggagattgggactccttctgcatgattcgatccaaattccacggcagctcggcgaggtcgcgagcttcggtgggagcaacatcgaaccgtccgtccgctcctgcttccaatttgcgaacaacaaaccagaaattgaagccgccctgttcctcgactggatgcgactggaaccacagtcgatggtctggctgcctgtgctgcaccgggtggcggcggctgaaaccgccaagcaccaggcaaagtgtaacatctgtaaagaatgcccaatcatcggattccgctaccggagcctcaagcacttcaactacgacatctgccagtcgtgtttcttttccgggcgggtggcgaaggggcacaagatgcactaccctatggtcgagtattgcactcccaccacttcaggtgaagatgtccgcgatttcgcaaaggtgctcaagaataagttcagaactaaacggtacttcgcaaaacatccacgcatgggatacctgccggtgcaaaccgtcctggaaggtgataacatggaaaccgacactatg

SEQ ID NO: 251248 - DNA, 3591 bp, synthetic construct
  misc_feature 1..3591: note = Description of Artificial Sequence: Synthetic coding sequence
  source 1..3591: mol_type = other DNA
atgctctggtgggaagaagtggaagattgttatgaaagagaggacgttcagaaaaagacctttactaaatgggtgaacgcacagttctcaaagtttggaaagcaacatattgaaaatcttttcagcgacttgcaggacggacggcgattgcttgatcttctggaaggactgaccggtcaaaaacttccaaaggaaaagggttcgactagagttcatgccctgaacaatgttaacaaggcactccgtgtcttgcaaaacaataacgtggatctggtgaacattggatccaccgatatcgtggatggaaatcacaagctgactctgggacttatctggaacattatccttcattggcaagtgaaaaatgtcatgaagaatatcatggcaggccttcaacaaacgaactcggagaagattctgctgagctgggtgcgtcagtccactaggaactaccctcaggtgaacgtcattaactttactacctcctggtccgacggccttgcacttaacgctctcattcattcacacagacccgatctgtttgattggaacagcgtcgtgtgtcaacagtcggcaacccagagactggagcatgcattcaacattgcacggtaccagctgggcattgagaaacttctcgaccctgaggacgtggatactacctaccctgacaagaaatccatccttatgtacatcacctcgttgttccaggtgctccctcagcaggtgtccatcgaggccatccaagaagtggaaatgctgcctaggcctcccaaggtcaccaaagaggagcatttccagcttcatcatcagatgcattactctcagcagataaccgtgtcactggcacaaggttacgaacgcaccagctcaccaaagcctcggttcaagtcctacgcttacactcaagcagcatacgtgactactagcgatccgacccgctccccttttccaagccagcatctggaagcaccagaagataagtcctttggatcctccctcatggagagcgaagtgaatcttgatagataccaaacggcactggaagaagtgctttcctggctgctttctgctgaggacactctgcaggcgcaaggtgagatttcaaatgatgtcgaagtggtgaaggaccaatttcatacgcacgagggatacatgatggatctgactgcgcatcaaggaagagtggggaacatcctccagctgggatccaagttgattgggaccggtaaattgtccgaagatgaagaaactgaagtccaagaacagatgaaccttcttaactcacgatgggaatgcctcagagtggcatccatggagaagcagtccaacctgcaccgcgtgctgatggatctgcagaaccagaagctgaaagaactgaacgactggctgaccaaaaccgaggagcgcacgcggaaaatggaagaggaacctttgggccctgatctggaagatctgaagcgccaagtgcaacagcataaggtgctgcaagaagatctggaacaggaacaagtgcgagtgaattcgctgacccatatggttgttgtcgtggatgaatcgtcgggagatcacgcaactgcagcgctcgaggaacagcttaaggtgctgggggatagatgggcaaatatctgtcggtggaccgaagatcgctgggtgctgcttcaagatatcctccttaagtggcaaagacttaccgaagagcaatgcctcttctccgcatggctttccgagaaggaggatgcagtcaataagatccatacgaccggtttcaaagaccaaaatgaaatgctttcgagccttcaaaaactggcagtcctgaaagccgatctggaaaagaaaaagcagtccatggggaaactttacagccttaagcaggatctgttgtcgactctcaagaacaagtctgtgacccaaaagacggaagcatggctggacaactttgcaaggtgttgggataaccttgtccaaaaacttgaaaagtcaaccgcacagatttcccaagcagttaccaccactcaaccaagccttacgcagaccacggtcatggaaaccgtcactactgtcactactagagagcagattttggtgaaacacgcacaagaagagcttccaccaccccctcctcagaaaaaacgtcaaatcactgtcgatactctggaacgccttcaagagcttcaagaggctactgacgaacttgatctcaagctcaggcaggcagaggtgatcaagggttcatggcaacctgtgggtgaccttcttattgattctcttcaagatcatctggaaaaggtgaaagccctgcggggggagatcgcaccgctgaaggaaaatgtgtcacatgtgaacgaccttgcccgccaactcaccactctcgggattcagcttagcccgtacaatctgtcgactctggaggaccttaacactaggtggaagctcctccaggtcgcagtggaggatcgcgtgaggcagcttcatgaggcacaccgcgattttggtccggccagccaacactttctcagcacctcagtgcaaggcccctgggaaagggcgatttcacctaataaggtgccctattacattaatcatgagacgcagactacctgttgggatcatcctaagatgaccgaactctaccaatccctggcggatctgaacaatgtgcgcttttcagcctaccgtacggccatgaaactgcggaggcttcagaaggcactgtgtctggacttgctgtcgctttccgccgcgtgcgatgcgcttgatcagcacaaccttaagcagaacgaccaacctatggacattctgcaaatcattaactgccttaccactatttacgatcgcttggagcaggagcacaacaacctggtgaacgttccactttgtgtcgacatgtgtctgaactggctcctgaacgtctacgatactggccgaactggaaggattcgggtgctctcgtttaagactggaatcatcagcctgtgtaaagcacatcttgaagataagtatcgctatctctttaaacaagtggcaagcagcactggcttctgtgatcaaagacgacttggactcctcctccacgactcaatccaaattcctcgccagcttggagaagtggcatcgtttggaggttccaacattgaaccttcggtgaggtcgtgctttcagtttgccaacaacaagccagaaatcgaagccgcccttttcctggattggatgcgactggagcctcagtcgatggtgtggcttcccgtgcttcatagagtggcagcagcagaaaccgctaagcaccaagccaagtgtaacatttgcaaggaatgtcctattatcgggtttcgttacaggtcgcttaagcatttcaactacgatatttgtcagtcgtgtttcttcagcggtagagtggcaaagggacacaagatgcattaccctatggtggaatactgcaccccaactacctccggagaagatgtgcgagattttgcaaaggtgcttaagaataagtttcgcaccaagcgctactttgcgaagcatcctcggatgggataccttcccgtccaaaccgtcctggagggagataacatggagactgataccatg

SEQ ID NO: 251249 - DNA, 3591 bp, synthetic construct
  misc_feature 1..3591: note = Description of Artificial Sequence: Synthetic coding sequence
  source 1..3591: mol_type = other DNA
atgctgtggtgggaagaagtggaggattgttatgagcgggaggacgtgcagaagaaaaccttcaccaaatgggtgaatgctcagttctcgaaattcggcaaacaacacattgaaaacttgttttccgatctgcaggatggtcgcaggcttctggatctgcttgagggactcaccggacagaagctgcctaaggaaaaaggaagcacccgcgtgcatgccctcaataacgtcaataaggcattgcgggtccttcagaataacaacgtggatctggtcaacattgggtccaccgatatagtggacggaaaccataagttgaccctcggactcatttggaatatcatcctgcattggcaagtcaagaacgtgatgaagaacattatggcaggactgcagcaaactaactccgagaaaatcttgctttcctgggtgagacagtccaccaggaactacccacaggtcaatgtcatcaatttcactacctcctggtccgatggtctggcactgaatgccctcattcactcccatcgacctgacctttttgattggaattcggtggtttgtcaacaatcggcaactcaaagacttgaacatgcgttcaacattgcacgataccagctggggatcgaaaagctgcttgatccagaggacgtggatactacttaccccgacaagaagagcatacttatgtacatcacgtccctgtttcaggtgctccctcaacaagttagcattgaagccattcaggaggtggagatgttgcctcgcccgccaaaggtcaccaaggaggagcattttcagcttcatcatcaaatgcactactcccagcagatcaccgtctcgctggctcaaggatacgagagaacgtcgtccccgaagccaagatttaagtcatacgcctacacgcaagcagcctacgtgaccacctcggaccccactcgctccccatttccaagccagcacctggaagcacccgaggacaagagtttcgggtcgtccctgatggaatcggaagtcaacctggatagataccagactgcactggaagaagtccttagttggttgctctccgcggaggacactcttcaggcgcaaggagaaattagcaacgacgtggaagttgtgaaggatcaatttcacacccacgagggttacatgatggaccttaccgcacatcaaggtcgcgtgggaaacattctccagctgggatcaaagctcattgggactggaaagttgtcagaggacgaagaaaccgaagtccaagaacaaatgaacctgctgaactcgagatgggaatgtcttagagtcgcgtcgatggagaagcagtccaaccttcacagagtgcttatggacctccagaaccaaaaactcaaagaactcaatgattggctgactaagactgaagaacggacccgtaagatggaagaagaaccgttgggcccagatctggaggatctgaaacggcaagttcagcagcacaaggtgcttcaggaggacctcgaacaagaacaagtgagagtcaacagtctgacccacatggtagtggtggtcgatgagtcatcaggtgatcacgccaccgctgcacttgaggaacagctcaaggtgctcggagataggtgggcaaacatctgtcgatggaccgaggatcggtgggtgcttctccaagatattcttctgaagtggcaacggttgactgaagaacaatgtctcttttcggcttggctgtcagaaaaggaggatgcagtcaataagatacataccactgggttcaaagatcaaaatgagatgctgagcagcttgcagaagctggcagtcctgaaggcagatctcgagaagaagaagcagtcgatgggtaagttgtattctctgaagcaagacttgttgtctactctgaaaaacaaaagcgtcacgcaaaaaactgaagcatggttggacaactttgcaagatgctgggacaacctcgtgcagaaattggaaaaaagcactgcacaaatttcacaagccgtgaccactacgcagccatctctgactcaaactaccgtgatggaaaccgtcactacggtcactactagagagcaaattcttgtgaaacacgcacaggaagaactgccacctcctccccctcaaaagaaaaggcaaattaccgtggacacgcttgaacgactgcaagaactgcaggaagcgacggatgagcttgacctgaaactgcgacaagccgaagtgattaagggctcatggcaaccagtcggggatctgctgattgacagccttcaagatcatttggagaaggtaaaggcgctgagaggggagatcgcccccctgaaggaaaacgtgtcgcacgtaaatgatcttgcacggcaactcactaccctcgggatacaactttcgccttacaacctttcgacgctggaagatctcaacaccagatggaagctgctgcaggtggcagtggaggatcgtgttaggcagctccatgaggcgcatcgtgattttggaccagcatcgcagcatttcttgagcaccagcgtgcagggcccttgggaaagggcaatttctcccaataaagtcccctactacattaatcatgaaacccaaaccacttgttgggatcacccaaagatgacggaactctaccagagcttggctgatctgaataacgttcgtttttccgcataccgaaccgccatgaagttgcgccgtctccaaaaggctctttgcctggacttgcttagcctttccgcggcatgcgacgcattggaccaacacaatcttaaacaaaacgaccaacctatggatatccttcaaatcatcaactgtctgacgactatttacgaccggctcgaacaagagcataacaacctggtgaatgtgcctttgtgtgtggatatgtgcttgaattggttgctgaatgtgtacgataccggcaggaccggaaggattcgcgtgctttcctttaagactggtataatcagcctgtgcaaagcacatcttgaggacaagtaccggtaccttttcaagcaggttgcttcaagcaccggcttttgtgaccaacgacgcctcggacttcttcttcatgactcgatacaaatccccagacagctgggtgaggtggcatccttcgggggttccaacatagagccgtcagtgcgttcgtgtttccagtttgccaataacaagccagaaatcgaagctgccctttttctggattggatgcgcttggaacctcaatcgatggtgtggcttccggtcttgcatcgtgtggccgcggccgaaactgcaaagcatcaagcaaaatgtaatatctgtaaagaatgtcctatcattggattcagatacaggagccttaagcactttaactacgatatttgccagagctgcttcttttccggaagggtcgcaaaaggtcataagatgcattatcctatggtggagtactgcacccctactacttccggcgaagatgtcagagattttgcaaaggttctcaagaacaagtttagaaccaagcggtactttgcaaagcatccccgaatgggctaccttcctgtgcagaccgtcctcgaaggcgataacatggaaactgataccatg

SEQ ID NO: 251250 - DNA, 3591 bp, synthetic construct
  misc_feature 1..3591: note = Description of Artificial Sequence: Synthetic coding sequence
  source 1..3591: mol_type = other DNA
atgctgtggtgggaggaggtggaagactgctacgagcgcgaagatgtacagaagaagacattcactaagtgggttaacgcacagttttcaaagtttggcaagcagcatattgagaaccttttcagtgatctgcaagacggaagaaggcttctggatttgttagagggtctcacaggccagaagctccctaaggaaaaggggagcaccagggttcacgccctcaataatgttaacaaggccctccgtgtcttacagaataacaatgtggatttagtgaacatcggctccactgacatagtcgatggcaaccataaattgacattgggattgatctggaacatcatcttgcattggcaggttaagaatgttatgaagaatataatggcaggattgcagcagactaattcagaaaaaattctgctctcgtgggtacgacagtccacgagaaactatcctcaagttaacgtgatcaatttcactactagctggtccgatggtctggccctgaatgccctgatccattcccaccgacccgacctcttcgattggaactctgtggtgtgccaacagtccgcaacacaacgtctggaacatgcttttaatatcgcaagataccagttgggtatcgaaaagttgctcgatcccgaagacgtagataccacttacccggacaaaaagtctatactcatgtacatcaccagtctcttccaggtcctgccccagcaggtatctattgaagccatccaagaggtggaaatgctgccaagaccccccaaggtgacaaaagaggaacacttccaactgcatcaccagatgcattacagccagcaaataaccgttagcctggcccaagggtacgagaggacatcttcccccaagccaagatttaaatcatatgcttacacacaggcagcatatgttacgacatccgatcctacccgcagcccattcccgagtcaacatctcgaggcgcccgaggataagagtttcggcagttccctgatggaaagcgaggtcaatctggaccggtatcagaccgcattagaagaggttctctcatggctcctatccgccgaggatactttacaggcacagggggaaatctccaatgatgttgaggtggtgaaggaccagtttcatacccatgaagggtacatgatggacctaactgcacatcagggcagagtggggaacattctccagctgggaagtaaactcataggaaccggaaaactgtcagaagatgaagagaccgaggtgcaggagcagatgaatttgctgaattcaagatgggaatgcttacgagtagcatcgatggagaaacagagcaatttgcatagagtgctcatggacttacaaaaccagaagctgaaagagctgaatgactggctgactaagacagaggagcgaactcggaagatggaagaagagcccctcggccccgatttggaggatctgaagaggcaagtgcagcaacacaaagtgttgcaggaagatcttgagcaggagcaggtgcgcgtgaacagtcttacacacatggtggtagtggtcgacgaaagctccggtgatcacgctacggccgctctcgaggagcagttgaaagtgttgggagaccgttgggcaaacatctgcagatggactgaagacaggtgggtgctacttcaggacatcctcttgaagtggcaaagacttactgaagagcagtgcttgtttagtgcctggttgtctgaaaaggaggatgccgtgaataagattcatactacagggtttaaagatcagaatgaaatgttgtcatctctgcaaaagcttgcggtcctaaaggccgatttagaaaaaaaaaagcagagcatggggaaactgtactcccttaagcaagacctgctgtccaccctcaagaataagtcggtcacgcaaaaaaccgaggcttggctggacaactttgcacgctgctgggacaacctggtgcagaagcttgaaaagtccaccgcccagatttctcaggccgtcacaacgactcaaccctcactgacacagaccacagtgatggaaacggttactaccgtgactacaagggagcaaattctagttaagcacgcacaggaggagttacctccccctccacctcagaaaaagcggcagattacagtggatacgctggagcgattgcaagaactccaagaagcaactgacgaactggatctgaagctgcgccaggctgaggtgatcaagggctcctggcaacctgtcggcgatcttctcatcgactccctgcaggaccacctggagaaggtgaaggctctaaggggggagatagctccgctgaaagagaacgtgagccatgtgaacgacttagcccggcagctgacaaccctgggcattcaattgagcccctacaatctgtcaacgctggaagacctgaatacacggtggaaacttctccaagtggcggtggaggatcgcgttcgccagctgcacgaggctcacagggacttcggtcccgcttcccagcactttcttagtacatcagtgcaagggccgtgggaacgagcaatttccccgaataaagttccgtactacatcaatcatgaaacccaaacaacctgttgggatcacccaaagatgactgaactctaccaatcactggctgatttaaataacgtgagattttctgcatatcgcaccgccatgaagctgaggagactccagaaggctttatgtctggacctgctctcgctctcggctgcttgcgatgcgttggatcagcataacttgaaacagaacgaccagccaatggacatccttcagataatcaattgccttaccacgatctacgatagactagagcaggaacataacaacttagtgaacgtaccactgtgcgtggatatgtgcttaaactggctcttaaacgtgtacgatacagggcggacagggcgcatcagagtgttgagctttaagacagggattatttcattgtgtaaggcacacctggaagacaagtatcggtatctgttcaaacaggtcgccagctctaccggattttgtgaccagagaagactaggtctgctgctacacgactctattcagatcccccgccagctcggggaagttgcctcgtttggtggcagtaacatagagcccagcgtaagatcctgcttccagtttgctaacaataagccggagatcgaagccgcccttttccttgattggatgaggttagaaccgcaatcgatggtctggcttccagtgctacacagagtggctgctgccgaaaccgctaagcaccaggcaaaatgcaacatttgtaaagagtgcccgattattggcttccgttacaggagtctgaagcacttcaattacgacatttgtcaatcttgcttcttttctggaagggtcgctaaagggcacaagatgcattaccccatggtcgagtactgtaccccaaccactagtggggaagacgtgagagatttcgcaaaagttctgaaaaacaaattccgaaccaaacgatacttcgccaagcacccaaggatggggtatctgccagtccagaccgtgctggaaggggataatatggagactgacaccatg

SEQ ID NO: 251251 - DNA, 3591 bp, synthetic construct
  misc_feature 1..3591: note = Description of Artificial Sequence: Synthetic coding sequence
  source 1..3591: mol_type = other DNA
atgttatggtgggaagaagtcgaagactgttatgagcgcgaggacgtgcaaaagaaaacttttacgaaatgggtgaacgcccagttttctaagttcggaaaacagcatatagaaaaccttttttcggacctccaagacggccgccgactgctagacctgcttgagggcctgaccggccagaaactcccgaaagagaaggggtccacaagggtccacgctctgaacaacgtgaataaggccttgcgtgtgctgcagaacaataatgtggacctcgttaatatcggatctacagatatcgttgatggtaaccataagctcaccttgggattgatatggaacatcatactgcattggcaggtgaaaaacgtgatgaaaaacatcatggccggattgcaacagacgaacagcgagaagatcctcctgagttgggtacggcagagcaccagaaactaccctcaggtgaacgtgatcaatttcaccacttcctggtcagatggtctcgcgctgaatgccttgatccactcccaccgtcccgacctgtttgactggaacagcgtggtgtgccaacagtccgcgacccaacggcttgaacatgcattcaatattgcgagatatcagctcgggattgaaaaactgctggatcccgaggacgtggacacaacctatcccgacaagaagtccatcctcatgtacatcacctccttgtttcaggtgctgccacagcaggtgagcattgaagcaatccaggaagtcgagatgctcccccgaccccctaaggtgacgaaggaggagcactttcagttacatcaccagatgcactactcacagcagattaccgtgtcattggctcaggggtacgaacgtacgtcctctcccaaaccccggttcaagagctatgcttacactcaggccgcatacgtgacaacctccgacccgacaaggtctcccttcccaagccagcatctcgaggctcctgaagataaaagcttcggctcctcactcatggaaagcgaggtgaatttggatagataccagaccgccttggaggaggtgctgtcttggctcctgtccgcagaagacacgctgcaagcacagggagagattagtaatgatgtcgaagtggtcaaggaccaattccatacacacgaaggttacatgatggatctgaccgctcaccagggaagggttggaaacattctgcagctaggctcgaagctcattggtacaggcaagctgagcgaagatgaagagacggaggtgcaggagcagatgaacctgttgaactcccggtgggagtgcttgagagttgcgagcatggaaaaacagtctaacttgcatagggtgttgatggatctccagaaccagaagctgaaggagcttaacgactggcttacaaaaactgaagaaaggactaggaagatggaggaggaaccactggggccagatcttgaagacctcaagaggcaggtgcaacagcacaaggttttgcaagaggatctggagcaggaacaggtgagggtgaacagtctgacacacatggtcgttgtcgtcgacgaatcctccggcgaccatgctactgcagcacttgaggagcaactcaaggtgcttggagaccggtgggccaacatctgtcgctggaccgaggaccgttgggtactcctccaggatattttactgaagtggcagaggcttactgaagaacagtgtttattctccgcatggctcagcgaaaaagaggacgccgtcaataagatccacaccacaggcttcaaggatcagaatgaaatgctctcctcacttcaaaagctggcagtgctcaaagcggatctggaaaaaaaaaagcagtcaatgggaaagctttacagccttaagcaagatctgctgtcaacactgaaaaataagtcagttacccaaaagacagaggcctggctggataactttgcacggtgttgggataatctcgtccagaagctggagaaaagtactgctcagatctcccaagccgtcacgaccacccagccttctctgacacagaccactgtgatggaaacggtgacaactgttacaacacgggagcagattctggtcaagcacgcacaggaggaacttcctcccccccctccacaaaagaagcgccagatcactgtcgacactttagagcgcctccaagagcttcaggaggccaccgacgagctggacctgaagctgcgccaggctgaggtaattaagggcagctggcagcccgtcggagatctgttgatcgactcccttcaggaccacctggaaaaggtgaaggccctgaggggagaaattgcgcctttgaaggagaacgtctcacacgtgaatgatcttgctcgccagctgacgacactaggaattcagctgtccccctataatctcagcacgttggaagacctcaacacccgctggaaactacttcaggtggctgtcgaagatcgggtgcgccagctgcatgaagcacatcgtgacttcgggccagccagccagcatttcttgtcgacttcggttcaggggccctgggaacgtgccatttcaccaaataaagttccatactatatcaatcatgaaacacagacaacctgttgggaccaccctaagatgaccgaactgtatcagagtttagcagatttaaataacgttagattctccgcttaccgcactgctatgaagctacgaagacttcagaaggcactgtgtttagatctgctatccctgagtgcagcctgcgatgcacttgaccaacataatctgaagcaaaatgaccagccaatggatattctccaaattattaattgcctgacaactatctatgatcgcctggagcaggaacataataatctggtgaacgtccctctctgcgttgacatgtgtttgaattggctgctcaatgtctacgacaccggaagaaccggtagaatccgcgtgttgtccttcaagactggtataatcagcctatgtaaggcacatctggaggacaaatacaggtatctattcaagcaggtggcatcctctaccgggttctgcgaccaacgccgactcggactgcttctgcatgattccatccagatcccaaggcaactgggggaggtggcttcattcggcggctcgaatatcgagccctctgtgcggtcctgcttccagtttgccaataacaagcccgagattgaggctgcactgttcctggactggatgcgtctggagccgcaatctatggtctggttgccagttctacatagagtggccgccgcggagactgctaagcatcaggctaaatgcaatatatgcaaggagtgccctattatcgggtttagatatcgaagcctgaagcatttcaattacgacatatgccagtcatgcttttttagtggccgcgtcgccaaaggccacaagatgcactatccaatggtggagtattgcactccaaccacatctggtgaggacgtcagggattttgcaaaggtcttgaaaaacaagtttaggaccaaaaggtacttcgccaaacacccccgcatggggtatctacccgtgcagacagtgcttgagggcgacaacatggaaaccgatactatg

SEQ ID NO: 251252 - DNA, 3591 bp, synthetic construct
  misc_feature 1..3591: note = Description of Artificial Sequence: Synthetic coding sequence
  source 1..3591: mol_type = other DNA
atgctctggtgggaagaagtggaggactgctacgaacgcgaagatgttcagaaaaagacgtttacgaagtgggtcaatgcgcagttttccaaattcggtaagcaacacatcgaaaatctgtttagcgacctgcaggatggacgcagacttctggacctcctggaaggcctgactggccagaagctgccgaaggagaagggcagcacgcgcgtccatgctctgaacaacgtcaacaaggcgctcagagtgctgcagaacaacaacgttgacctggtgaacatcggatccaccgacattgtcgatgggaaccataagctgaccctcggactcatctggaatatcattctccactggcaggtgaaaaacgtcatgaagaatatcatggcaggactgcagcagactaattcagaaaagatcctcctgtcgtgggtgcggcagtcaactcggaactacccgcaggtgaatgtgatcaatttcaccacttcgtggtcggacggactcgcactcaatgcactcatccatagtcataggccggacctgttcgactggaactccgttgtgtgccagcagtcagccacccagagactggaacatgcattcaacatcgcccggtatcagttgggaatcgaaaaacttctggaccctgaagatgtggataccacttaccctgataagaagtccatcctcatgtacatcacttccctgttccaagtgctgcctcagcaggtttcgatcgaggccatacaggaggtggaaatgttgccccggccgccgaaggtgaccaaggaggagcacttccagctgcatcaccagatgcactacagccaacagattactgtctcgctggctcagggatacgagcgcacctccagtccaaagccaaggtttaagtcatacgcatacacccaagccgcctatgtcactacttcggacccaaccagaagccctttcccgtcacaacatttggaagcgccggaagataaatcattcggatcatcgctgatggagtcggaggtgaaccttgatagataccagaccgcgctggaagaagtgctgtcctggctcctctcagcagaggacaccctccaagcacagggcgaaatctccaacgacgtcgaagtggtcaaagatcagttccatactcatgagggatacatgatggatctcaccgctcaccaggggcgcgtgggaaacatcctgcaactgggatccaagctgatcggcaccgggaagctgtcagaagatgaagaaaccgaagtgcaggagcaaatgaacctcctgaattcacggtgggaatgtctgcgcgtggcgagcatggagaaacagagcaacctgcatcgggtgctgatggatttgcagaatcagaaacttaaagaactgaatgactggctcaccaagaccgaggaaaggacccggaagatggaagaagagcccttgggtcctgatctcgaagatctgaagcgccaggtccagcaacacaaggtgctgcaagaggacctggagcaagaacaggtccgcgtgaactcccttacccatatggtggtggtcgtggacgagagctcgggcgatcacgccaccgccgccctggaagagcagttgaaagtcctcggcgaccgttgggccaacatctgccgctggaccgaggacagatgggtgctgctgcaagacatcctgctgaagtggcagcgactcacggaggaacagtgtctcttctcagcctggctgagcgagaaagaggacgcagtgaacaaaatccacaccacggggttcaaggaccagaacgaaatgctgtcgtcgctgcagaagctggccgtgctgaaggctgacctcgagaagaaaaagcaaagcatggggaagctgtactcgctgaagcaagacctgctctccaccctcaagaacaagagtgtcacgcaaaagactgaggcatggcttgataactttgctcggtgctgggataacctggttcagaaattggaaaagtcgactgctcaaatttcgcaggccgttaccaccacgcagccgtctcttacgcaaacgaccgtgatggaaaccgtcaccaccgtgaccaccagagagcagattcttgtgaagcatgcccaagaggaactcccacctccgcctccgcagaaaaagaggcaaatcactgtggatactctggaaaggctgcaggaactccaagaggccactgatgagctcgatttgaagctgagacaggcggaagtgattaagggttcatggcagccggtcggtgaccttcttatcgactcgctgcaagaccatttggaaaaggtcaaggcactgcggggggagattgccccactgaaggagaatgtgagccatgtcaacgatctcgcacggcagctgactaccctgggaattcaactgagtccttacaatctctcaaccctcgaggatctcaacacccgatggaagttgttgcaggtggcagtggaggacagagtgcggcagctgcacgaggcgcaccgggacttcggaccagcctcccaacatttcttgtcaacctcggtgcaaggcccttgggagcgagcaattagcccaaataaggtgccgtactacatcaatcatgaaactcaaaccacttgctgggaccatcccaaaatgactgaactgtaccagtctcttgctgatctcaacaacgtccgcttttccgcctaccgcacggctatgaagctcagacgcctgcaaaaagccctttgcctcgacttgctctcgttgtcggcggcatgtgacgcactggaccagcacaacctcaaacaaaacgaccagcctatggacatcctgcaaatcataaactgcctgaccaccatctacgaccgcctggagcaggagcacaacaacctcgtgaacgtgcccctgtgtgtggacatgtgcctgaattggctcctcaacgtgtatgataccggacgcactgggcgaatcagagtcctctcgttcaagaccggaatcatctcattgtgtaaagctcatttggaggacaaataccgctacctcttcaagcaagtggcttcgtccaccgggttttgcgaccaaaggcggctgggcctgttgctccatgactcgatccagatcccccgccaactgggagaagtcgcgtcatttggagggtcaaacatcgaaccatcggtgagatcctgcttccagtttgctaacaacaaaccagaaatcgaagcggcgctcttcttggactggatgagactggagccccaatcaatggtgtggcttcctgttctgcatagagtggcggccgccgaaactgcaaagcaccaggctaaatgtaacatatgcaaggaatgcccaatcatcggcttccgctacagaagcctgaaacacttcaattatgacatttgccagtcctgcttcttttccggacgcgtggcaaagggccataagatgcactacccgatggtggaatactgtactccaaccacttccggagaggatgtgcgggacttcgctaaagtgctcaaaaacaagttcagaactaagcgctacttcgcgaagcaccctcggatgggttacctgccggtgcagactgtgctggaaggcgacaatatggaaaccgacacgatg

SEQ ID NO: 251253 - DNA, 3591 bp, synthetic construct
  misc_feature 1..3591: note = Description of Artificial Sequence: Synthetic coding sequence
  source 1..3591: mol_type = other DNA
atgctttggtgggaggaagtggaggactgttatgaacgagaggacgtccagaaaaaaacatttacaaagtgggtgaacgcacagttctcaaaattcggtaagcagcatattgaaaacctcttcagtgacctacaggacgggcggagactgcttgacttgttggaggggcttactggccagaaattgcccaaggaaaaggggagcacccgggtgcatgctcttaataatgtgaacaaggctctacgggtgttgcagaacaataacgtcgacctggttaatatagggagcactgatatagttgatgggaaccacaaactcaccttgggtctcatttggaacatcattttacattggcaggtgaaaaacgttatgaagaacattatggctggcctacagcagaccaacagcgagaagatcttgctgagttgggtgcgacagtccacccgaaattatccacaagtcaacgtgatcaacttcacaacatcatggtcggatggccttgcactaaatgctcttattcactcacacaggcctgatttgttcgattggaatagcgtagtgtgccagcaaagcgctacccagcggttggagcatgccttcaacattgccagataccagctcggcatagagaagttgctggaccctgaggatgtcgacacaacctaccctgacaagaagagcattcttatgtatatcacaagcctttttcaggtcttgccacagcaggtcagcatcgaggccatccaggaggtggagatgcttcctcggccacccaaggtcactaaggaagaacatttccagctgcatcatcagatgcattattctcagcagatcaccgtctcactcgcgcaggggtatgaacgaacatcttcacccaaacctcgcttcaagagctacgcctatactcaggcagcctacgtgactacatcagaccccacccgttccccttttcctagtcaacacctcgaagcgccggaagataagagctttggcagctctttgatggaatcagaagtaaatctggatcgctaccagactgcactggaggaggtgctgtcatggctgttgtcagccgaggacaccctccaggctcagggggaaataagcaacgatgtggaagtggttaaagatcagttccatacccacgagggctatatgatggaccttaccgctcaccagggaagagtcggaaatatcctgcagctgggttcaaaactgattggcaccggtaaactctcggaagatgaagaaactgaagttcaggagcagatgaacctgttgaactctaggtgggagtgtctgcgggtggccagtatggaaaagcaaagcaacttgcaccgagtgttgatggatctacagaatcagaaattgaaggagctgaacgattggctgactaagaccgaggagcggacgcggaagatggaggaggagccactcgggccggacctggaggacttgaagaggcaggtccagcagcacaaggtgctacaggaagacctcgagcaggaacaggtccgggtgaacagtctcacccacatggtagtcgtggtggacgagagcagtggtgaccatgccacagccgctttggaagaacagctgaaagttttaggagatcgatgggcaaatatctgccggtggacagaggacagatgggttctcctgcaggatatactgcttaaatggcagagactcacagaggagcagtgcctgttctccgcgtggctcagcgaaaaggaggacgcagtcaacaagatccatacgaccggcttcaaggatcagaatgagatgctgtcctcgctacagaagctcgccgtcctgaaggccgacctggagaagaagaagcagtcaatggggaagctctacagcctcaaacaggatttgcttagtacacttaagaacaaatcagtgacccagaaaacagaggcatggctggacaattttgcaaggtgctgggataacctagttcaaaagttggaaaagtctacggctcagatttcccaggccgtgaccactactcagccgtcactgactcagacaactgtgatggagaccgtgacgacggttacaacgcgggaacagatactcgtcaaacatgcacaggaggaactgccccccccgcctccacagaaaaagaggcaaataaccgtcgatactctagagcggctacaagagttgcaggaggcaaccgatgagctcgatctgaaattgcggcaagcagaagtgataaagggctcatggcagcctgttggcgatttgctgatcgactccctgcaagatcatctggaaaaagtgaaggccttgcgtggtgaaatcgccccactgaaggagaatgtgtctcacgtaaatgacctggcccgccagctaaccactcttggaatacagctgagcccttacaaccttagtaccctcgaagacctaaatacccgctggaaactactacaagtggcggtggaagatagagtcaggcaactacacgaggcacaccgtgattttggaccagcgtcacaacattttctgtctactagtgtccagggcccttgggagcgggctatcagtcccaacaaagtcccatattacattaaccatgagacacagacgacctgttgggaccatccaaaaatgaccgagctataccagagtctcgcggatctgaacaacgtgaggtttagcgcatacagaacagccatgaagcttcggagactccagaaggccctgtgcttagacctcctgtccctgtcggcggcatgcgatgcgctggatcaacacaatctaaaacagaatgatcaacctatggacattctgcagatcatcaattgtttaaccacaatatatgatagacttgagcaagagcataataatctcgtgaacgtgccgctgtgcgtggacatgtgcctgaactggttactaaatgtctatgacaccggtcgaactggcagaattcgggtcctgtcttttaagaccggcatcatttctttgtgtaaagcgcatctcgaagacaaataccgctacctattcaaacaggttgcttcctccactggtttttgtgaccagaggcgattggggcttctcctgcacgactccatccaaattcctcgccagttaggcgaagtcgctagtttcggcgggtctaacatcgagccctccgtgagatcctgctttcagtttgccaataacaagcctgaaatcgaggctgccctttttctcgactggatgcgtcttgaaccgcagtcaatggtctggcttccagtgctgcatcgagtggctgcggcggagactgctaagcatcaggctaagtgtaacatctgcaaagagtgcccgataattggattccgctaccgctctcttaaacattttaattatgatatttgtcaatcctgttttttctcggggagagtggcgaagggccataaaatgcattaccccatggtcgagtactgcactcctacaacaagcggagaagatgtacgcgattttgccaaagtgctaaagaacaagttcagaacgaagcgatactttgcaaagcatcccagaatgggctatctcccggtgcagacagtcctggagggagataatatggagacggacacaatg

SEQ ID NO: 251254 - DNA, 3591 bp, synthetic construct
  misc_feature 1..3591: note = Description of Artificial Sequence: Synthetic coding sequence
  source 1..3591: mol_type = other DNA
atgctgtggtgggaagaagtcgaggactgctacgaacgcgaggacgtccagaagaaaacgttcactaagtgggtcaatgcgcagttcagtaaattcggcaaacagcacatcgaaaatctgttttcagacctgcaagacgggcggcgcctgcttgatcttctggaaggactcaccgggcaaaagctgccgaaggaaaaaggtagtaccagagtgcacgccttgaataacgtcaataaggccctgagggtcctccagaataacaatgtggatctcgtgaacattggatcgaccgatatcgtggacggaaaccacaagttgacccttggattgatctggaacataatcttgcactggcaggtgaagaacgtgatgaaaaacatcatggccggactgcagcagaccaactccgagaagatcttgctcagctgggtgcggcagtcaacccgcaactacccccaggtcaatgtgatcaacttcactacgtcatggtcagatggattggccttgaacgcactcatccattcccaccggccggacctctttgactggaactcagtggtgtgccaacagtcggccactcaaagactcgaacatgccttcaatatcgcccggtaccaacttggaatcgaaaaactgctcgaccccgaagatgtggacaccacgtacccagacaagaaatccatcctgatgtacattacctccctgttccaagtattgccacagcaagtctctattgaagcgatccaagaagtggaaatgctgccgcggccgccgaaggttaccaaggaggaacacttccagttgcatcaccagatgcactactcgcagcagataaccgtcagcctcgcccaaggatatgagcgaacttcctccccgaagccgcggttcaagtcctacgcatacactcaggcagcctacgtgactacctctgaccccacgaggtcgccctttccgtcccagcatctcgaggcaccggaggacaaatcctttggatcaagcctcatggagtccgaggtgaacttggacaggtaccaaaccgctctggaggaagtgcttagctggctgctgtcagcagaagatactttgcaagcccaaggagagattagcaatgatgtcgaagtggtgaaggatcaattccacactcatgaaggatacatgatggatctgaccgctcatcaaggtcgagttggaaatatcttgcaattgggaagcaagctcatcggaaccggcaagctgagcgaggatgaagagacggaggtccaggagcagatgaacctgctgaattcgcggtgggagtgtctgcgggtggcctcaatggaaaagcagagcaacctgcatcgggtgctcatggacctgcagaaccaaaagctgaaggagctcaatgactggctgaccaagaccgaggagcgaacgcgcaagatggaggaagaacccctcggcccagatcttgaggatctgaaaagacaggtgcaacagcacaaagtgctccaagaagatcttgaacaggaacaggtgcgcgtgaactcactgacccatatggtggtcgtggtggacgaatcttcaggggatcacgcaactgccgccctcgaagagcagctgaaggttctcggggaccgttgggcgaacatctgccgctggactgaggacagatgggttctgctgcaggacatcctgctcaagtggcaacggctgactgaagagcagtgccttttcagtgcctggctctccgaaaaggaagatgcggtcaacaagatccacaccactggattcaaggaccagaacgaaatgctgtcatcgctccaaaaactcgccgtgctcaaggcggacctggagaagaagaagcagtccatgggaaaactttacagccttaagcaagatctcctctctaccctgaaaaacaagagcgtgactcaaaagaccgaagcctggctcgataactttgctcggtgctgggacaacctggtgcaaaaactggagaaatcgaccgcacaaattagccaggctgtgactactactcaacctagcctgacccaaactaccgtaatggaaaccgtcactaccgtgactactcgtgaacagatactcgtgaagcatgctcaggaggaactgcctcctccaccaccgcaaaagaagcgacagatcaccgtcgataccctcgagcgcctgcaggagctgcaagaagcgaccgacgagctggacctgaagctgcggcaagcggaagtgatcaagggatcctggcagcctgtgggggacctcctgatcgacagcttgcaagaccatctcgagaaagtcaaggcactcagaggcgagatcgcccctcttaaggagaacgtgtcccacgtgaatgatttggcccgccagctgactacgctgggaatccagctgtcaccatacaacctgtcgactctcgaagatctcaacacccgctggaaacttctgcaggtcgctgttgaagatcgcgtgcgccagctgcatgaagcgcaccgcgacttcgggcctgcctcgcagcacttcctgtccactagcgtccagggcccatgggagagagcaatttcccccaacaaagtgccgtactatatcaatcatgaaacgcagaccacttgttgggaccatccgaaaatgaccgaactctaccagtcgctggccgacctgaataatgtgcgcttctcggcgtatcgcaccgccatgaaactgcgcagattgcaaaaggcgctgtgccttgacctcctttccttgagtgcagcctgcgacgccctggaccagcacaaccttaagcaaaatgatcaaccgatggacatcttgcagatcattaactgcctcactactatctacgaccgcctcgagcaggaacacaataatctcgtcaacgtgccgctctgcgtggatatgtgtctcaactggttgctgaacgtgtatgataccggtagaactggcagaatccgggtcttgtccttcaagaccggaatcatatcgctgtgcaaggcgcacctggaagataagtacagataccttttcaagcaggtcgcctcttcgaccggtttctgtgaccagcgacgacttggactgctcctccacgattctattcaaatcccgagacagctcggtgaggtggcgtcctttggcggctccaatatcgaaccttccgtgcggtcgtgttttcagttcgctaataacaagcctgagattgaggctgccctgtttctcgactggatgcgcttggagccacaaagcatggtgtggctgcccgtcctgcaccgcgtcgcagcggcagaaactgcgaagcaccaggcaaagtgcaacatctgcaaggagtgcccaattatcgggttcaggtaccggagcctcaaacatttcaattacgatatctgccagtcgtgcttcttttcaggccgcgtggctaagggtcacaaaatgcattaccctatggtcgagtactgcactccgacgacgtcaggagaagatgtgcgggatttcgctaaagtcctgaagaacaaatttcggacgaagcgctatttcgctaagcacccgagaatgggatacctgccggtgcagaccgtgttggaaggcgataacatggaaactgacaccatg

SEQ ID NO: 251255 - DNA, 3591 bp, synthetic construct
  misc_feature 1..3591: note = Description of Artificial Sequence: Synthetic coding sequence
  source 1..3591: mol_type = other DNA
atgctgtggtgggaggaagtcgaagattgctacgagagggaagatgtgcaaaagaaaacttttaccaagtgggtgaatgcacaattttctaagttcgggaaacaacatattgagaaccttttttcggatctgcaggacggcagacgcctcctggacctgctggagggactcaccggacagaagctcccaaaggaaaaaggctccacccgcgtgcacgcacttaacaatgtgaataaggcattgagagtgcttcaaaacaacaatgtcgaccttgtgaacattggctcgacggacatcgtggatggaaaccataagttgaccctgggactgatctggaatatcatccttcactggcaagtcaagaacgtgatgaagaacatcatggcaggactgcaacaaacgaattccgaaaagatcctcctttcgtgggtgaggcaatcaactcgtaactaccctcaggtgaacgtgataaacttcactactagctggtcggacggactggccctcaatgcacttatccattcacacaggccagacttgttcgattggaatagcgtggtctgtcagcagagcgcgactcaaagactggaacatgcttttaacattgcccgataccagctgggaattgagaaactccttgaccctgaggatgtcgataccacctaccctgataagaagtcgatcctgatgtacattacgtccctctttcaagtgctgccgcaacaagtgtcgattgaggcaattcaggaagtggaaatgcttccaagaccgcctaaggtcacgaaagaggagcacttccagctgcatcaccagatgcattactcccagcagattaccgtgtcccttgcacagggctacgaacgtacctcgtccccgaaaccacgcttcaagtcctacgcatacacccaggcagcgtacgtgaccacttcggatcctacccggtccccttttccatcccaacatctggaagcaccagaagataagtcatttggttcgtcgctgatggaatccgaagtgaatcttgatagataccaaactgcactggaagaagtgctttcgtggcttctctcagcggaggataccctccaggcacaaggtgaaatatccaatgacgttgaggtcgtcaaagaccaattccatactcacgagggatacatgatggatcttactgcacatcaaggaagggtgggaaacatactccagctcggaagcaaacttattggaactggaaaacttagcgaggatgaagaaaccgaagtgcaggaacagatgaaccttcttaatagccgctgggagtgtctgagagtcgccagcatggaaaagcaatcgaacctgcacagggtgcttatggatctgcaaaaccaaaaacttaaagaactcaacgattggctgaccaagaccgaggagcggactcgaaagatggaagaagaacccctgggtcctgacttggaggaccttaaacgacaggtgcagcaacacaaagtcctccaagaggaccttgagcaggaacaggtcagagtcaacagcctgacccacatggtggtcgtggttgatgagtcgtcaggagatcacgcgactgctgccttggaggagcaacttaaggtgcttggagacaggtgggcaaacatttgtcgctggaccgaggaccgctgggtgctcctgcaggatatcctcctgaagtggcagagactgacggaggagcaatgcctgtttagcgcatggctgtcggaaaaagaagatgcagtcaacaagattcataccactggattcaaggatcaaaatgaaatgcttagctctcttcaaaagctggctgtgcttaaggcggaccttgaaaagaagaagcagtctatgggcaagctctactctctgaaacaagatctgctgagcacccttaagaataagtccgtgacccaaaagaccgaagcatggcttgacaattttgcccggtgttgggacaacctggttcagaagttggaaaagtccactgcacaaatcagccaagcagttaccactacccaacctagcctgacccaaactaccgtgatggaaaccgtgacgaccgtgacgactcgagagcagattctggtcaagcatgcgcaggaggaactgcctccgcctccgccacagaagaagcggcagataacggttgataccctcgaaaggcttcaggagctgcaagaagccactgatgaattggatctgaagctgagacaggcagaggtcattaaaggatcgtggcaacctgtcggtgaccttctgatagattcccttcaagatcatctcgaaaaagtcaaggccctccggggagaaattgcaccccttaaagaaaatgtgtcccatgtcaacgacctggcaagacagcttaccactcttggcatccaactctccccatacaacctgtccaccctcgaagatctgaataccagatggaagctgctccaggtggccgtcgaagatcgggtccgccagcttcacgaagcacatcgagactttggaccagcgagccaacatttcctgtccacctctgtgcaaggtccttgggagagagcaatctcccccaacaaggtgccgtactacattaaccatgaaactcaaactacctgttgggaccatcccaagatgactgagctgtatcagtcacttgcggacctcaacaacgtgcgcttctcagcgtaccggactgcaatgaagctcagaaggctgcagaaggccctttgtcttgatcttctttcgctgtccgccgcatgcgacgctctcgatcaacataatcttaaacagaacgaccagccaatggacattctgcaaatcataaactgccttactaccatttacgacaggcttgaacaggagcacaacaatctggtgaatgtcccactgtgtgtggacatgtgccttaattggttgctcaacgtgtacgacacgggtagaaccggccgtatcagagtgctgtcgttcaagaccggtataatcagcctttgcaaagcacacctggaagataagtatcgctacctgttcaagcaggtcgcatcgagcaccgggttttgcgatcaacggagacttgggctccttctgcatgacagcatacagatccctcgtcagctgggcgaggtggcctcgtttggaggttcgaatattgagccttcagttcgctcgtgtttccagtttgcaaacaataaacccgaaattgaagcagctttgttcctggattggatgcgtctggaacctcagagcatggtgtggctccccgtcctccatcgggtggcggctgctgaaaccgcaaaacatcaggccaagtgtaacatttgtaaagagtgccccatcataggattcaggtacaggtcgcttaagcatttcaactacgatatttgtcaatcgtgcttctttagcggaagagtcgcaaagggacataagatgcattatccaatggtcgagtactgtacccctactacttcgggcgaagatgtccgggattttgctaaagtgctcaagaacaagttcagaaccaaacgctattttgctaagcatccacgaatgggttacctccctgttcaaactgtccttgaaggcgacaatatggaaactgacactatg

SEQ ID NO: 251256 - DNA, 3591 bp, synthetic construct
  misc_feature 1..3591: note = Description of Artificial Sequence: Synthetic coding sequence
  source 1..3591: mol_type = other DNA
atgttgtggtgggaggaagtggaagattgttatgagagagaagatgtccagaaaaagacgttcactaaatgggtgaacgcccagttttcaaagttcgggaagcaacatattgaaaatttgtttagcgacctgcaggacgggcgccggcttctggacttattggagggactgacaggacaaaaacttccaaaagaaaaggggtccacacgggtgcacgctctaaataatgtcaataaagctttaagggtgctccagaataacaatgttgacctggtgaatattggttccaccgatatcgtggatgggaatcataaactaacacttgggttgatctggaatatcattctccattggcaagttaagaacgttatgaagaatatcatggctgggttacagcagaccaactctgagaagatcctattgtcctgggttcggcaatccacccgtaactaccctcaagtcaacgttatcaacttcactacatcgtggagcgacggtctagccctcaatgctctgattcacagccatcggcccgatcttttcgactggaattctgtggtctgccagcagtctgctacccagagactagaacacgcctttaatattgccagatatcaattggggatcgagaaactgctggatcccgaagatgtcgacactacttatccagacaaaaagtccattctgatgtacatcaccagcctgtttcaagtcctgccgcaacaggtgtctatcgaagccatacaggaggtcgagatgctgcctcgcccaccaaaggtcactaaggaggaacattttcagttgcaccatcagatgcactattcccagcaaatcaccgtgtcattggctcagggctatgagagaacgagttcacccaaacccagatttaaatcctacgcctacactcaggccgcttacgtgactacttctgaccctactcggtcgcccttcccctcccagcatctggaggcaccagaggataaatccttcggctcctctctgatggagagtgaagtgaacctggatagatatcagacagcactggaagaggtgctgtcatggctgctgagcgccgaggacacactccaagctcagggcgaaataagtaacgatgtcgaggtggtgaaagaccagttccatacacatgaggggtatatgatggacctgacggctcaccagggacgcgtgggcaacattttacagcttgggtcgaagctaataggcacgggcaagctgtctgaagacgaggagacagaagtgcaggaacagatgaatctgctaaactcgagatgggagtgtcttcgggttgcttccatggaaaagcagagtaatcttcaccgggtgttgatggacttgcagaatcaaaaattgaaagagctcaatgactggctgactaagactgaggagaggacgcgtaagatggaggaagaaccgctcggcccagatctagaggaccttaagaggcaggttcaacagcacaaggtactccaggaggacttggaacaggaacaggtacgagtaaactcgctaacccatatggtggtcgttgtggatgagagttctggcgaccatgcaactgccgcgcttgaagaacagctgaaagtcctaggtgataggtgggcaaatatctgccgctggaccgaggaccggtgggtgttactgcaggacatactgctgaagtggcagcggctgactgaggagcagtgtctattctccgcttggctctcagaaaaggaggatgctgtaaacaaaattcatacaaccgggttcaaagaccagaacgagatgttaagtagtctacaaaagctggctgttctcaaggcagatcttgagaaaaaaaaacagagcatgggaaagctgtacagtctgaaacaggatctgctctctacactcaaaaataagtctgtcacgcagaaaaccgaagcctggttggacaattttgcacgttgttgggataatctggtccaaaaacttgaaaaatccacagcccaaatttctcaggccgtgactacaacccagccctcgctaacccaaaccacagtgatggagacagtcacaacagtgacgactagagaacagattctcgtcaagcacgcccaggaggaattgcccccccccccacctcagaagaaaagacaaattaccgtggataccttggagaggctgcaggaacttcaagaggctaccgatgaactggatttaaagctcagacaggccgaggtgatcaaagggtcatggcagccggtcggggatctgctaattgactccctgcaggaccacctggagaaagtcaaggccctgcgtggagagattgcccctctaaaggaaaacgtgagtcatgtcaacgacctggcccgacagctgactactctgggcatccagctatccccatataatctgagtacgctggaggatctgaataccagatggaagctgttacaggtggcggtggaagatcgagtgcgtcagctccacgaagcacatcgagatttcgggcctgcgtctcaacatttcctgtctaccagtgtgcagggcccgtgggagagagccatctcacctaataaggtcccatactacattaaccatgagacccagactacctgctgggatcacccgaaaatgacggaactctaccagtctctcgccgatctaaataacgtgaggttcagcgcttaccgcaccgccatgaagttaaggcgcctgcaaaaagcgctgtgcctggatttgctctccctcagcgccgcttgtgacgccctcgatcaacacaatctcaagcagaatgatcaaccgatggatattctgcagatcatcaactgcctgaccacaatttacgaccggcttgagcaggaacataacaatctggtcaatgttcccctgtgtgtcgacatgtgtctgaactggctattgaatgtctacgatactggtaggaccggccggattagagtattgtcatttaaaacgggaatcattagtctctgtaaggcccacttggaagacaaatacaggtatcttttcaagcaggttgcctcgtccacaggtttctgcgaccagcgccgcttggggctactgctccatgactccatccagatcccccgtcaactcggggaggttgcctcctttggaggtagtaacatcgagccttcggttcgcagctgcttccagtttgctaataataagcccgagatcgaagccgccctcttcctggattggatgagacttgagccccagtcaatggtgtggctgccggtcctgcaccgcgttgcggcagctgagaccgctaaacatcaggccaaatgtaatatctgcaaagagtgccccatcatcgggttcagatacaggtcactgaagcattttaactatgacatatgtcaaagctgttttttctcagggcgggtggcgaaaggccataagatgcactaccccatggtcgagtactgcacaccaacaacctccggcgaggacgtgagagattttgcaaaagtacttaaaaacaaatttcgtactaagcggtactttgctaagcatccgcggatgggctacctaccagtgcagacggtgctcgaaggagacaacatggagacagatacaatg

SEQ ID NO: 251257 - DNA, 3591 bp, synthetic construct
  misc_feature 1..3591: note = Description of Artificial Sequence: Synthetic coding sequence
  source 1..3591: mol_type = other DNA
atgctgtggtgggaagaggttgaggactgttatgaaagagaagacgttcaaaaaaagacctttaccaaatgggtcaatgctcagttttcaaaatttggaaagcagcatattgagaatttattttctgatctgcaggatggccgtagattattggatttattggaggggttaacaggacaaaaacttcctaaagaaaaaggtagcacccgggtgcacgctctgaataatgtgaacaaggcgctcagggttcttcagaacaacaatgttgatttagtcaatatcggttcaactgacattgtcgatggaaatcacaaactgacactcgggcttatatggaatattattctgcattggcaggtcaagaatgttatgaaaaacattatggctggattgcagcaaacaaattctgaaaaaatcctgttatcatgggtccgtcagtccacacgtaattatccccaggtgaatgtaattaattttactaccagctggagcgacggccttgccctgaacgcacttatccatagccacagaccagatctgttcgactggaatagcgtggtgtgccagcaaagtgctacacagcggttagagcatgcctttaacattgccaggtatcaattagggattgagaaattgcttgacccagaggatgtcgatacgacgtatccggataaaaaatctattttgatgtatataacgtctttattccaagtccttcctcagcaggtcagcatcgaagccattcaagaagttgaaatgcttccgagaccgccgaaggttactaaagaagagcattttcagctacaccatcagatgcattatagtcaacagatcaccgtgagtcttgcacaaggttatgaacggacgtcatccccgaaaccgagattcaaatcatacgcttatacgcaagctgcatatgtgacaacatccgaccctacccgatctccatttccgtctcagcatttggaggcgccagaagacaaatctttcggctcatcgttaatggaatctgaagttaatcttgatcgatatcagacagccctcgaagaggtgttgtcttggcttctctccgcagaagacacgttgcaagcacaaggagaaatcagtaatgatgtggaagttgtcaaagatcagtttcatactcacgaagggtacatgatggaccttacagcgcaccaaggccgggtcggaaatatcttgcagctgggctcaaaattgattggaacggggaagttgagcgaagacgaagagacagaagtacaggaacagatgaacctgctgaattctcggtgggagtgtttacgggtagcgtcaatggaaaaacaatctaatttgcatagggtgttaatggatttgcagaaccaaaaactgaaggaactgaacgactggctaactaaaacagaggagcgtacacgaaaaatggaggaggaaccgcttggccctgatctggaggaccttaagagacaggttcaacaacacaaggtgctgcaggaagatctggaacaggagcaagtacgggtcaattcgctgacgcatatggtcgtcgtggtggacgaatcgtccggagatcatgcaacagctgcactggaagaacaattgaaagttttgggagaccgctgggccaacatttgccgatggaccgaggataggtgggttctattacaggatatcctgcttaaatggcaacgtcttacagaagaacagtgtctgttctcggcctggctgtccgagaaagaggatgcggttaataaaattcatacaaccggctttaaggatcaaaatgaaatgttgtctagcctccagaaactggccgttttgaaagcagatcttgagaagaaaaaacagagtatggggaaactgtattcacttaaacaagacctgttatctacactcaagaataaatctgttacccaaaagacagaggcatggctcgacaactttgctaggtgttgggacaatctcgttcaaaaattagaaaagtctacggcccagataagccaagcagttacgaccacgcagccgtcactgacgcagacaactgtgatggaaacagtaactaccgtcacaacccgagagcagatccttgttaaacatgcgcaggaagaacttccaccgcctccgcctcagaaaaaacgccagattacggtagacacccttgaacggcttcaggaacttcaggaagcaacggacgaattagatctcaaactgcgacaagctgaagttatcaagggatcgtggcaaccagttggtgatctcctgatagattcactgcaggatcacctggagaaagtaaaagctctccggggtgagatcgcaccgctgaaagaaaacgtttctcacgtcaacgacctcgcaaggcagctaacaacacttggtatccagttaagtccatacaatcttagcactttagaagatctcaatacacgctggaaacttttgcaggtggcggtagaagatagggtccgtcaacttcatgaagcgcatagagattttggacctgcttcacagcatttcctgtcaacatcggtgcaaggtccgtgggaacgtgcaatttcccccaataaggtcccatattacattaatcacgaaacccaaacaacatgctgggatcatccaaaaatgacggaactatatcaatcgttagctgatctcaacaatgttagattttccgcatatcgtacagcgatgaagctgcggcgtttacaaaaagccttatgcttagatttactttctctaagtgcagcatgtgatgccctagatcagcataacctcaaacagaacgaccagccaatggatatcctgcagattatcaactgtctgacaacgatctatgatcgccttgagcaagagcataataacctggtaaacgtccctctatgtgttgatatgtgtctcaattggttgctgaatgtctacgatactgggagaactggtcgtatcagggtgctttcgtttaagaccggcatcatttcattgtgtaaagctcaccttgaagacaaataccggtatctttttaaacaggttgcgagcagcactggattctgcgaccagaggcgtctcggacttctcttacacgattccattcagatccctcggcagttaggcgaagtagcaagctttggaggctcgaacatcgagccctcggtgcgatcatgttttcaattcgccaataacaagccagagattgaagcagcgttgttccttgattggatgcgcctcgaacctcaatcgatggtatggctgccggttctgcacagagtcgcggctgcagaaactgcaaaacaccaggctaaatgtaacatttgcaaagagtgtccaattattggatttcgatatagatccctgaaacactttaactatgacatatgtcaatcttgtttcttctctggacgtgtcgcaaagggtcataagatgcactatcctatggtcgaatactgtacaccaacgacgtcaggagaggacgtaagagatttcgcaaaagttctgaaaaacaaattccggacaaaacgatattttgctaaacatccgcgtatggggtaccttcctgtccaaacggtactagagggagataacatggaaaccgacactatg

SEQ ID NO: 251258 - DNA, 3591 bp, synthetic construct
  misc_feature 1..3591: note = Description of Artificial Sequence: Synthetic coding sequence
  source 1..3591: mol_type = other DNA
atgctttggtgggaggaagtagaggattgttatgaaagggaagacgttcaaaaaaaaacgttcactaagtgggtaaacgcccagttctctaagtttggtaaacaacacattgaaaaccttttttcagatttacaggatggtagaagacttctggaccttctggagggtctcaccggacagaaattgcccaaggagaagggtagcactagggtgcatgcgctgaacaatgttaataaagccctcagggtgttgcaaaacaacaacgtggacctcgtaaacattgggagcacggatatcgtcgatggaaatcacaaactgacccttggactgatatggaacatcatcctgcactggcaggtgaagaatgtcatgaaaaacattatggcgggactgcagcagacaaactccgagaagatactgctgtcttgggtgagacaaagcacccgcaattatccccaggtgaatgttatcaattttacaacaagttggtccgatgggctggctttaaatgctctgatccacagccatcgaccagacctgttcgactggaattccgtggtgtgtcagcagtctgcaactcaacggctggaacacgctttcaacatagcaaggtatcaactggggattgaaaaactgctggatcccgaagatgtggacacaacttatccagacaaaaagtcaatattgatgtatatcactagcctgttccaggtgctcccccaacaggttagtatcgaggcaattcaagaggtggaaatgcttcctaggcctccaaaagtaacaaaagaggagcacttccagctgcaccaccagatgcattatagtcagcaaatcactgtgagcctggcccagggctatgagagaaccagctcgccaaagcctaggttcaaaagctacgcctacacgcaggctgcttacgttacaacttcggaccctactcggtctcccttccccagccagcacctggaagccccagaagataaatctttcggatcaagcctcatggaaagtgaagtgaacttggatcggtaccagacagcattggaagaagtactttcatggctgctctcagccgaagacacgctgcaggctcagggtgaaatctcgaacgatgtcgaggtagtgaaggaccaatttcacactcacgaaggatatatgatggaccttacagcacaccagggccgcgtcggcaacatactgcagctgggctctaagctgatcggaactgggaaattaagcgaagacgaagagacagaggtccaggaacagatgaatttgttgaatagtcgctgggaatgcctccgagttgccagtatggagaagcagagtaatctgcacagagttctcatggatctccagaatcagaagctgaaagaactgaatgattggttgactaaaactgaagagagaacaagaaagatggaggaggagccacttggccccgatctggaagatctaaaaagacaggtgcagcaacataaagttctccaagaggacctggagcaggaacaggtgcgggtcaactcgcttacccacatggtcgtggtagtggacgagagtagtggtgaccacgccaccgctgcactcgaggagcagctgaaagtcctgggggatcgctgggccaatatatgcaggtggactgaggatcgctgggtgctactgcaagacatcctgctgaagtggcaaaggctcacggaggagcagtgtctgttcagcgcctggctgtcggagaaggaagatgctgtgaacaagatccatactactggtttcaaagatcagaatgaaatgttgagttccctgcaaaagctggccgttctgaaggcagacctggaaaagaagaaacagagcatggggaaactgtactccctgaagcaggatcttctctccacactgaagaacaagagtgtcacacagaagactgaagcgtggcttgataatttcgcaaggtgctgggacaatctggtgcaaaagctggagaagtcaacagcacagatctcccaggctgtcacgaccacccagccgtcattgacacagacaacagtgatggagactgtcacgaccgtcacaactagagaacagattctggtgaaacatgcacaggaagaactgcctcccccacctccccagaagaaaagacagattaccgtggataccctggagagactgcaggagttacaggaagctactgacgaactggacctgaagctgcgccaagccgaagtaataaagggttcttggcagccagtcggggacctcctgatagatagccttcaggaccatctggaaaaggtgaaggctctccgtggggaaatagctccactcaaggagaatgttagccacgtgaatgacctcgcacgccaactcactaccctgggtatacagctgtcgccctataatctgtcaaccttagaagacctgaatactcgatggaagctgttgcaagtcgctgtcgaagacagggtgcgccaactccatgaagcccatagggatttcgggcctgccagccagcactttctgtccacatcagtccaggggccctgggagcgcgccatcagtccaaacaaagtgccctattatatcaaccacgaaactcaaactacttgttgggatcatcctaagatgacagagctttatcaaagcctggcggatctaaacaacgttcggtttagcgcctatcgaactgctatgaaactgaggcggttacagaaggcgctctgcctggacctgctcagcctgtccgcagcctgcgatgcgcttgaccagcacaacctgaagcagaatgaccagccaatggatatactccaaattatcaactgtttgaccactatatacgatcggttagagcaagaacataataatctggttaacgtgccgctctgtgtcgatatgtgcttgaactggctgcttaacgtgtacgatacaggtagaacaggcaggattcgagttctgtcgtttaaaactggaattatttccctatgcaaagcccacctagaggacaaatacaggtacctgttcaaacaggttgcctcttcaaccggattctgtgaccagcgaagactcggcctgctgcttcacgactccatccagatcccccggcaacttggcgaggtagcctctttcgggggctctaacatcgaaccctctgtccgcagctgtttccagttcgcgaacaataagccggaaattgaggcagcattgttcctggactggatgcgcttagaaccgcagagcatggtctggctgcctgttctgcaccgggtcgcagcagccgaaaccgctaaacaccaggccaaatgtaatatttgtaaagagtgcccaatcatcggttttcggtacaggtctctgaaacactttaattacgatatatgtcaatcatgttttttttctgggagagtggcaaaagggcataaaatgcactaccccatggtggagtattgcacgcctaccacatctggggaagacgtgcgagacttcgctaaagtgctcaagaataagtttcggaccaaacgctactttgccaaacatccgagaatgggctatctgcccgtgcagactgtgctggaaggcgacaacatggaaactgacaccatg

SEQ ID NO: 251259 - DNA, 3591 bp, synthetic construct
  misc_feature 1..3591: note = Description of Artificial Sequence: Synthetic coding sequence
  source 1..3591: mol_type = other DNA
atgctgtggtgggaagaagtcgaggactgttacgaaagagaagatgtgcagaaaaagacttttactaagtgggtcaacgcccaatttagcaaattcggaaagcaacacattgagaacctgttttccgatcttcaggacgggcgcagattgctcgaccttctggaaggactgaccggccagaaacttcccaaggaaaaaggaagcactagagtgcacgcattgaacaacgtgaacaaggcactgcgcgtgctgcagaataacaacgtggatctcgtgaatattggttccaccgacatcgtggacggtaaccataaactcacgcttggtcttatctggaacattatactgcattggcaggtgaagaacgtgatgaagaacattatggcaggactgcaacagaccaactccgaaaagatcttgctctcgtgggtgagacagagcacgcgtaactacccacaggtcaacgtgataaactttaccactagctggtcggacgggcttgcactgaacgcccttatccattcccacagacctgacttgttcgattggaacagcgtggtgtgtcagcaatcagccacccaacgcctggaacatgccttcaacattgcccggtaccaactcggaattgaaaaacttctggaccctgaagatgtggacactacttatcccgataagaagagcatccttatgtacattacttcgctgtttcaagtcctgccccagcaagtgtcaattgaagcaatccaggaggtggaaatgctcccacgaccgcctaaggtaaccaaagaagagcacttccagcttcatcaccagatgcactactcccagcagattaccgtgtcactggcgcagggatacgaacggactagcagcccaaaaccaagatttaagtcttacgcatacacccaagcggcgtacgtgaccacctcggatccaactcggagccctttcccatcgcagcatcttgaagcacccgaagataagtcgtttggttcgtcactgatggagtcggaggtgaacctggatcggtaccagaccgcgctggaagaagtcctttcgtggctgctgtccgcagaggacactcttcaggcccagggtgagatcagcaatgatgtggaagtcgtgaaggatcagtttcatactcacgaggggtacatgatggatctgaccgctcatcagggcagagttggtaacattcttcagctcggcagcaaactgatcggcactgggaagctgtcggaagatgaagaaactgaggtccaggaacaaatgaaccttctgaactcgagatgggagtgtctccgggtggcatctatggaaaaacagtcgaatctgcatagagtccttatggaccttcagaaccagaagctcaaagaactgaacgactggttgactaaaactgaggaacgcactagaaagatggaagaagagccccttggtcctgatcttgaggatctcaagcggcaagtgcagcagcataaggtgttgcaagaggatctggaacaggaacaggtgagagtgaactccctcactcacatggtggtcgtcgtcgacgaatcttcgggtgaccacgcgaccgcagcacttgaggaacaacttaaagtcctgggagatcgctgggcaaacatttgcagatggaccgaggataggtgggtgctgcttcaggacatactcctgaaatggcaaagactcactgaagaacaatgtctgttctcggcatggctctccgaaaaagaggatgccgtcaacaaaattcataccacgggatttaaggaccagaatgagatgctttcctccctccaaaagctggcagttctgaaggccgatttggagaagaaaaaacagagcatggggaagttgtactcattgaagcaagatctgctctcaaccctgaagaacaagtccgttactcaaaagactgaagcatggcttgataacttcgctagatgttgggataacctcgtgcaaaaacttgaaaagtccaccgcccaaatcagccaggccgtgaccacgacccaaccttccttgacccagacgactgtcatggagactgtgacgactgtcaccacgcgcgaacagatcctcgtgaagcacgcgcaagaggagttgccacccccaccccctcagaagaagagacaaattaccgtggatactcttgagagactgcaggaacttcaagaagcaaccgacgagcttgatctgaagctgcggcaagcagaggtcattaaaggctcatggcaacctgttggtgatctgttgattgatagccttcaggatcatttggaaaaggtcaaagcactcaggggggagatcgcgcctctgaaggagaatgtgtcccatgtgaatgatcttgcccggcagctcaccaccttgggtattcagctgagcccttacaatttgtcgaccctggaagatctcaatacccgctggaagctccttcaagtggcagtggaagatcgcgtgcgccaactccacgaagcacatagagactttggtcctgcctcacaacacttcctttccactagcgtgcaaggtccctgggaacgcgccatttcgcctaacaaggtcccatactacattaaccatgagactcaaactacctgttgggatcatccaaagatgaccgagctgtaccagtccctcgcagacctgaataatgtcagattctcagcataccggaccgccatgaagctgaggcggcttcaaaaggcactttgcctggatctgctctccctttcggcagcgtgtgacgccctcgatcagcataatctcaagcaaaacgatcagccaatggatattctgcaaatcatcaattgtctgaccactatttacgatcgccttgaacaagaacacaataacctcgttaatgtccctctgtgtgtggatatgtgcctgaattggctcctcaacgtctacgatactggtaggactggaagaatccgtgtccttagtttcaagaccggcattatctccttgtgtaaggcacatcttgaggacaagtacagatacctgttcaaacaggtggcatcgagcaccggattttgtgatcaaaggcgtctgggtttgcttctgcatgatagcatccagatccctagacaacttggtgaagtcgcgagctttggaggatccaatatcgagccttccgtcagatcctgctttcagttcgctaacaataaacctgaaatcgaggctgctctgtttctggattggatgaggctcgagccccagtcgatggtctggctgccagtgcttcatcgagtggccgcagcagaaaccgcgaaacatcaggcaaagtgtaatatctgtaaagaatgtcccattattggctttcgttacagatcgttgaaacacttcaattacgatatctgccaaagctgttttttctcgggacgagtcgcgaagggacataagatgcactacccaatggtcgaatactgcactcccactacttcgggtgaagatgtccgtgatttcgccaaggtgcttaagaataagtttagaaccaagaggtacttcgcaaagcacccacgtatgggttatctccctgtccagactgtcctggagggcgacaatatggaaacggacactatg

SEQ ID NO: 251260 - DNA, 3591 bp, synthetic construct
  misc_feature 1..3591: note = Description of Artificial Sequence: Synthetic coding sequence
  source 1..3591: mol_type = other DNA
atgttgtggtgggaggaggtggaggactgctacgaacgagaggacgtacagaaaaaaacctttaccaagtgggtgaatgcacaattctcgaaattcgggaaacagcacatcgaaaatctcttctccgacctgcaggatggacgcaggctgctggatttgctggagggcctgacaggacaaaagctcccgaaagaaaaaggcagcacccgggtgcacgccctgaacaacgtgaacaaggccctgagagtgcttcagaacaacaacgtagatttagtcaacatcggatccaccgatatagtggatgggaaccacaagctaaccttgggcctgatctggaatatcattctgcattggcaggtgaagaatgttatgaaaaacatcatggccggcctgcagcaaaccaattcagagaagatcctgttgagttgggttaggcagagcacccggaactaccctcaggtcaacgtgattaatttcacaacttcgtggagcgacggactggccttaaacgccctgatccactcacaccgtccagacctgttcgactggaactccgtcgtttgccagcagtcagcgacccagcggctggaacacgccttcaacatcgcccgctaccagctcggtatcgaaaaactgctggaccctgaggacgtcgacacgacctatcccgataagaaatctatcttaatgtatatcacttccttatttcaggtccttccccagcaggtgtccatcgaagccatccaagaggtagaaatgctgccgaggcctccaaaggtgacgaaggaagaacactttcaactccatcatcagatgcattactcacagcagatcacagtttccttggcccaaggatatgagaggacaagtagccccaagccccgcttcaagtcatatgcttatacacaggctgcatacgtcaccaccagtgacccaacccgctcgccctttcccagtcagcacctcgaggccccagaggataagtccttcggctcctccctgatggaatcagaagttaatctggataggtatcagacagcactggaagaggtcctttcctggctcctatccgccgaagacaccttgcaggcgcaaggtgaaataagtaacgacgtggaggtggtcaaagaccagtttcatacacatgagggttacatgatggatctgactgcacaccagggccgcgtgggaaacattctacagctggggtcaaagttgattggaactgggaagctttcagaggatgaagagactgaggtgcaagagcagatgaacctgctgaatagccggtgggaatgtctgcgggtcgcatcaatggagaagcaatctaatctccacagagtgctgatggaccttcaaaatcagaagctaaaggagctgaatgactggctgaccaaaactgaagagcgtacacggaaaatggaagaggaaccactcggtcccgatctggaggatctgaagcggcaggtacagcagcataaagtgctgcaggaggatcttgagcaagagcaagtgagggttaacagtcttacacatatggtggtcgtggtagatgaaagttccggagatcatgccacggccgcattagaggaacagctcaaggtgctcggtgatcgctgggcaaacatttgcagatggacggaagatcgctgggtactgctgcaggatattcttcttaagtggcaaaggctgaccgaggaacagtgcctgtttagcgcctggttgagcgaaaaggaagacgccgtaaacaagatccataccacaggtttcaaagatcagaacgagatgctctccagtcttcagaaactcgctgtcctgaaggccgaccttgaaaaaaagaagcagagtatgggcaaattgtacagtttgaagcaggacttgttgtcgactctgaagaacaagagcgtcacacagaagaccgaggcctggttagacaatttcgccaggtgctgggacaacttggtgcagaaactcgaaaagtccactgcccagatctctcaagccgttactaccacacagccttcattgactcagaccacggtgatggaaacagtgacaactgtcacaactagagaacaaattcttgtgaagcatgcccaagaagaactgcctccgccacccccccaaaagaaacgccaaattacggtggacaccctggaacgactccaagagttgcaagaagccacagatgagctcgatctcaaactccgtcaagccgaagtgataaaagggtcgtggcaacctgtgggagatctcctgatcgactccctccaggatcatctcgaaaaagtgaaggctcttcgaggcgaaatcgcgcctctgaaggagaatgtctcccatgtgaatgatctggccaggcagctgactacccttggcatccaactgagcccttataatttgtctaccctggaggatttgaacacccggtggaagctgctgcaggttgccgttgaggacagagtgcgacaactgcatgaagcccatcgggatttcgggccggcttctcagcactttctttcaactagtgttcagggcccatgggagagagccatcagtcctaacaaagtgccctattatatcaaccacgagacgcagaccacgtgttgggatcaccctaaaatgaccgaactgtatcagagcttggctgatctgaacaatgtacggttctccgcatatcgaacagctatgaagctgcggaggctgcaaaaggccctctgcctggatctgctgtcgctttccgcggcatgtgatgccctggatcagcacaacttaaaacagaacgaccagcctatggatatcctgcagattattaattgcctgacaactatatacgaccgcctggaacaagagcacaacaatctagtcaacgtcccattgtgtgtggatatgtgccttaactggttgctcaacgtgtacgatacgggacgaacaggtaggattagagtactgtcctttaaaacaggcatcatctcactctgtaaagcccacctggaagacaaataccggtacctgttcaagcaagtggcatcttcaacaggcttctgtgatcagaggcgcttagggctgctgctacatgactctattcagattcctaggcagctgggagaggtggcatcattcgggggcagcaatatcgaacccagtgtgaggtcttgcttccagttcgctaacaacaagcctgagatagaagcagccttattcctcgattggatgcggttagagccccagtcgatggtgtggctccccgtcttacaccgggtggccgcagccgaaacagcgaagcaccaggcgaaatgtaatatctgcaaagaatgtcccattatcgggttcagatatcgaagcctgaagcactttaactacgacatatgtcagagctgcttcttttccggacgcgtggctaaggggcacaagatgcactacccgatggttgagtactgtactccgacaacaagcggggaggatgtgcgggattttgccaaggtgctcaaaaacaaatttagaactaaacgttatttcgcaaagcaccctaggatgggttatttgccagttcagaccgtcttggaaggggacaacatggagaccgataccatg

SEQ ID NO: 251261 - DNA, 3591 bp, synthetic construct
  misc_feature 1..3591: note = Description of Artificial Sequence: Synthetic coding sequence
  source 1..3591: mol_type = other DNA
atgttgtggtgggaagaagtggaagattgttacgaacgggaggacgtgcagaagaaaactttcactaagtgggtgaatgctcagttctcgaagtttggaaagcaacacattgaaaatctgttctccgacctgcaggacggtagacgcttgctcgacctgctggagggactcactggacagaaactgccgaaggaaaagggttcgaccagagtccatgcactcaacaacgtcaacaaggccctgcgcgtcctgcaaaacaacaatgtggatctggtcaacatcggttccactgatatcgtggatggaaaccacaaactcaccctcggtcttatctggaatatcatccttcactggcaagtgaaaaatgtgatgaaaaacatcatggccggcctccaacaaactaactctgaaaagattctcctgtcatgggtgcggcagtcaactcgcaactacccgcaggtgaatgtgatcaactttacgacctcgtggtcagacggactggctcttaacgccctgatccactcacacagacctgatttgttcgactggaactcagtggtgtgccagcaaagcgctacccagcggctggaacacgcattcaatatcgcgaggtaccaacttggaattgaaaaactgctggatccggaggacgtcgatactacttacccggacaagaaatcgatcttgatgtacataacgtcactgtttcaagtgctgccgcagcaggtcagcattgaggccattcaagaagtggaaatgctcccgcggccaccgaaggtgactaaagaggagcactttcaactgcaccaccagatgcattactcacagcaaatcaccgtgagcctggcccagggctacgaacggacttcctcgccgaaacctagattcaaatcctacgcctacacccaggctgcttacgtgactacgtccgacccgacccggtcgcccttcccatcccagcatctggaagccccggaggacaaatcatttggttcgagcctgatggaatcggaagtgaacctcgaccggtatcagactgcacttgaggaggtgctcagctggctgctctcagccgaagatactctgcaagcacaaggagaaatctccaacgatgtggaggtcgtgaaagatcagttccatactcacgaaggctacatgatggaccttaccgcccaccagggccgggtggggaacatcctgcagctcggatcaaagctgatcggaaccgggaaactttccgaggacgaagaaaccgaagtgcaagaacagatgaatcttctgaactcacgttgggaatgtctccgcgtggcgtcgatggagaaacagtccaaccttcacagagtgctgatggacctgcagaaccagaagctgaaggaactgaacgactggctcaccaaaacggaggaacggaccagaaagatggaggaggaaccactcggccctgatcttgaggacttgaagcgccaagtccaacagcacaaggtgcttcaggaggacctggaacaggagcaggtgagggttaattccctgactcacatggtcgtcgtggtggacgaatcgtccggagatcacgcaactgccgccctggaggaacagcttaaagtgctgggcgaccggtgggctaatatctgcaggtggactgaggataggtgggtgctgctccaagatatcctgctcaagtggcagcgcctcaccgaggagcagtgtctgtttagcgcgtggctcagtgagaaggaggatgccgttaacaagattcatacgaccggatttaaggaccagaacgaaatgctctcgtctctgcagaaactggccgtgctgaaggccgatcttgaaaagaagaagcaatccatgggaaaactgtattccctcaagcaagacctcttgagcaccttgaaaaacaagagcgtgacccaaaagaccgaagcgtggctggacaacttcgcgcgctgctgggacaacctggtgcaaaaactggagaagtcaaccgcgcagatctcccaggcggtgactaccacccagccctcactgacccagaccaccgtcatggagacggtcaccaccgtgacgactcgggagcagatcctggtgaagcacgcacaggaggaacttcctccgccgccaccacagaaaaagaggcagatcactgtcgacaccctggagcgccttcaagaattgcaagaggccaccgacgagcttgatctgaaactgcgacaggccgaggtgatcaagggatcatggcagccggtgggcgacctgcttattgactctctgcaggaccatctcgaaaaagtgaaggcactgagaggagaaatcgcacccctgaaagagaacgtgtcccatgtgaatgatctcgccaggcagctcacgaccctcggaatccaactctcgccttacaatctgtccacccttgaggacctgaatacccggtggaagctgctgcaggtcgcagtggaggatcgcgtgcgccaactccatgaggcgcatcgggacttcggaccagccagccagcatttcctttccacttcggttcagggcccctgggagcgtgctatctctcctaataaggtcccgtactacattaaccatgaaacccagactacctgctgggatcacccaaagatgaccgaactgtaccagtcactggccgatttgaataacgtgcgcttctcggcctacaggacggcaatgaagctccgcaggctccaaaaggcgctgtgcctcgatctcctgtccctttccgccgcatgcgatgcattggaccagcacaacctgaagcagaatgaccagcccatggacattctccagattatcaattgcctgactactatctacgaccgcctggaacaagagcacaacaatctggtgaacgtgccgctctgtgtcgatatgtgccttaattggctgttgaatgtgtacgatactggccgcaccggccgcattagagtgctctcatttaagactggaatcatctccctgtgcaaggctcatctcgaggacaagtacagatacctctttaaacaggtggccagctcgacgggcttctgcgaccaacggcgcctcggcctgctgcttcatgattccatccagatcccgaggcaactgggagaagtggcgtcctttggaggctctaacattgaaccaagcgtccgctcgtgtttccaattcgcaaataacaagccggaaatcgaagctgcactgttcctcgactggatgaggctcgagccacagagcatggtctggttgcctgtgcttcatcgcgtggccgccgctgaaaccgcaaagcatcaggccaagtgcaacatctgtaaggaatgtccgatcatcgggtttagataccgctcactcaagcacttcaattacgacatctgccagtcgtgctttttctcgggacgcgtggccaaaggccacaagatgcactacccgatggtggagtactgcactccaaccacttcaggagaagatgtgcgggacttcgcaaaagtgctcaaaaacaaatttcggaccaaacgttactttgccaagcatccgaggatgggatacctcccagtgcagactgtccttgaaggtgataacatggagactgacaccatg

SEQ ID NO: 251262 - DNA, 3591 bp, synthetic construct
  misc_feature 1..3591: note = Description of Artificial Sequence: Synthetic coding sequence
  source 1..3591: mol_type = other DNA
atgctgtggtgggaggaggtcgaggactgctacgaacgggaagacgtgcaaaagaagacatttacaaaatgggtgaatgcccagttctccaagttcggaaaacagcacatcgagaaccttttcagcgacctgcaagatggtagaagattgttggatttgctcgagggccttaccggacagaaacttccaaaggaaaagggctcaacaagagtgcatgctctcaataacgtaaataaagcactccgggttttgcagaacaataatgtcgacctcgtgaatattgggagcacagatatcgtggatggcaaccacaagttgacgcttggcctgatttggaacattattttgcattggcaggtgaagaacgtgatgaagaacatcatggctggtctgcagcagactaatagtgagaaaatcctcttgagttgggtgagacagagtacaagaaactacccccaggtgaatgtgataaacttcactacctcttggtctgacggcctggcactgaacgctctgatacatagtcatagaccggatctctttgactggaatagcgtggtgtgtcagcagagcgcaactcagcggctggagcacgccttcaacatagcacgataccagcttgggattgagaagctgctggatccagaagacgtagacaccacatatccagataagaaaagcatactgatgtatatcactagccttttccaagtgctgcctcaacaagtgtccatcgaagctatccaagaagtggagatgctcccacggccacctaaggtgacgaaggaagagcactttcagctgcaccaccagatgcactactcacagcagatcacagtgagtctcgcacaaggttacgaaagaacatcctctcctaaaccaagatttaaatcttacgcctacacacaggccgcatacgttactacttctgacccaactagatctccgttcccctcacagcacttggaggctcccgaggacaagtcctttggctcttcactcatggagagcgaggtgaatctggatcgctatcagactgccctcgaggaggtgctgtcttggcttcttagcgctgaggacaccctgcaagctcagggagagattagcaacgacgttgaagtcgtaaaagatcaatttcatacccacgaaggctatatgatggatctcacagcccaccaaggacgggtcggtaatatactgcagctgggatctaagctgatcggtacagggaagcttagtgaagatgaggagacggaggtgcaagaacagatgaacctgctgaactctcggtgggagtgcctccgcgtcgccagcatggaaaaacaaagcaacctgcatagagtcctgatggatctgcagaaccagaaactcaaagagttgaatgattggctgacgaaaacagaggaaagaacaagaaaaatggaagaagagccgctcggccctgatcttgaggatctcaagaggcaggttcaacagcacaaggtgctgcaggaagatctcgagcaggagcaagtgagggtaaactcactgactcacatggtagtcgttgtggatgaatcatctggtgatcacgcgacagccgcattggaggaacagctgaaggtactgggtgataggtgggcaaacatctgccgctggaccgaagataggtgggtgctgctgcaggacattctgcttaagtggcagaggttgactgaggagcagtgtctgtttagcgcctggctgtctgaaaaggaggatgcagtgaacaagatccataccacagggttcaaggatcagaatgagatgctgagttccctgcagaaactcgctgttctgaaggcagacttggagaagaagaaacagagtatgggaaagctgtacagcctgaagcaggatctcttgtctactctgaagaataagtccgtgactcagaaaactgaggcatggctggacaattttgcccgctgctgggacaacctcgttcagaaactggaaaaaagtactgcccagatttcccaggctgtaaccacgacacagccctccctcacacaaactaccgtgatggagacagtgaccacagtcaccacaagggagcagatacttgttaagcacgcccaggaggagctgccccctccaccccctcagaagaagcggcagatcacagtggatacactcgaacgcctgcaggaactccaggaggcaactgatgagctggacctgaagctgaggcaggcagaagtcatcaagggcagttggcagcccgtcggtgaccttcttatcgactcacttcaagaccaccttgagaaggtgaaggccctgcgcggtgagatcgcccctttgaaggaaaatgtctcacatgttaacgatttggcacggcaactgactacgctcggaatccagctcagcccatataacttgtccacgctggaggaccttaacacgcgctggaagttgctgcaagtggccgttgaggatcgggtccggcagctgcacgaggctcatagggactttggccccgcttctcagcacttcctgtccacctccgtgcagggcccttgggaaagagctatcagcccaaataaggtgccatactatataaaccatgagacccagaccacttgttgggatcatccgaagatgactgaactctatcaaagtctggccgatctgaacaacgtcagattcagcgcctaccggaccgccatgaaactccgacgcctccagaaggcgctgtgcctcgatctgctttcactttccgcagcgtgtgacgcactggaccagcataacctgaaacagaacgaccaacccatggacatcctgcaaattatcaattgccttaccaccatttatgaccgacttgaacaggaacacaacaacctggtaaacgtccctctgtgtgtggatatgtgtctcaactggttgttgaacgtttatgacaccggcaggacgggtagaatccgcgtcctgagctttaagacaggcatcatttcactgtgcaaagcccacttggaagacaaatatcggtaccttttcaagcaggtcgcttcctcaacgggattctgcgaccagcgcagactgggactccttctccatgattccatacagataccccgccagcttggcgaggtggcctcctttggaggcagcaatatagaaccatccgtgcgaagttgctttcagtttgccaataacaagccagagatcgaagctgccctgtttctggactggatgaggctggagccgcagtctatggtgtggctgcctgtgctccacagggtagcagccgctgagaccgcgaaacaccaagccaagtgtaatatctgtaaggagtgccctatcattgggttcaggtacaggtcattgaagcactttaactatgacatatgccagagttgcttttttagtggcagggtggccaaaggacacaaaatgcattaccccatggtggagtactgcacgcctacaactagtggtgaggatgtgcgagatttcgccaaagtgctcaagaacaagttccgaactaaacggtatttcgccaaacaccctagaatgggctatctgcccgtgcagaccgttctggaaggcgacaatatggagaccgacacgatg

SEQ ID NO: 251263 - DNA, 3591 bp, synthetic construct
  misc_feature 1..3591: note = Description of Artificial Sequence: Synthetic coding sequence
  source 1..3591: mol_type = other DNA
atgttatggtgggaagaagttgaagattgttatgaacgtgaagatgtacaaaaaaaaacgtttacgaaatgggttaatgcgcaattttcgaaatttggtaaacaacatatagaaaatctattttcggatttacaagatggtcgacgtttactagatttattagaaggtttaacgggtcaaaaactaccgaaagaaaaaggttcgacgcgtgtacatgcgttaaataatgttaataaagcgttacgagtactacaaaataataatgtagatttagttaatataggttcgacggatatagtagatggtaatcataaactaacgttaggtttaatatggaatataatactacattggcaagtaaaaaatgtaatgaaaaatataatggcgggtctacaacaaacgaattcggaaaaaatattattatcgtgggtacgacaatcgacgcgaaattatccgcaagtaaatgtaataaattttacgacgtcgtggtcggatggtttagcgttaaatgcgttaatacattcgcatcgaccggatttatttgattggaattcggttgtatgtcaacaatcggcgacgcaacgactagaacatgcgtttaatatagcgcgatatcaactaggtatagaaaaattattagatccggaagatgtagatacgacgtatccggataaaaaatcgatattaatgtatataacgtcgttatttcaagttttaccgcaacaagtttcgatagaagcgatacaagaagtagaaatgttaccgcgtccgccgaaagtaacgaaagaagaacattttcaattacatcatcaaatgcattattcgcaacaaataacggtatcgttagcgcaaggttatgaacgaacgtcgtcgccgaaaccgcgttttaaatcgtatgcgtatacgcaagcggcgtatgtaacgacgtcggatccgacgcgatcgccgtttccgtcgcaacatctagaagcgccggaagataaatcgtttggttcgtcgttaatggaatcggaagtaaatttagatcgttatcaaacggcgttagaagaagtattatcgtggctactatcggcggaagatacgttacaagcgcaaggtgaaatatcgaatgatgttgaagtagtaaaagatcaatttcatacgcatgaaggttatatgatggatctaacggcgcatcaaggtcgtgttggtaatatactacaactaggttcgaaactaataggtacgggtaaattatcggaagatgaagaaacggaagtacaagaacaaatgaatttattaaattcgcgttgggaatgtctacgtgtagcgtcgatggaaaaacaatcgaatctacatcgagttttaatggatttacaaaatcaaaaactaaaagaattaaatgattggctaacgaaaacggaagaacgtacgcgtaaaatggaagaagaaccgttaggtccggatttagaagatttaaaacgtcaagttcaacaacataaagttttacaagaagatctagaacaagaacaagttcgtgtaaattcgttaacgcatatggttgttgtagttgatgaatcgtcgggtgatcatgcgacggcggcgttagaagaacaattaaaagttttaggtgatcgatgggcgaatatatgtcgatggacggaagatcgttgggtattactacaagatatactactaaaatggcaacgattaacggaagaacaatgtctattttcggcgtggttatcggaaaaagaagatgcggttaataaaatacatacgacgggttttaaagatcaaaatgaaatgctatcgtcgttacaaaaattagcggtattaaaagcggatctagaaaaaaaaaaacaatcgatgggtaaattatattcgctaaaacaagatctattatcgacgttaaaaaataaatcggtaacgcaaaaaacggaagcgtggctagataattttgcgcgatgttgggataatctagtacaaaaattagaaaaatcgacggcgcaaatatcgcaagcggtaacgacgacgcaaccgtcgttaacgcaaacgacggtaatggaaacggtaacgacggttacgacgcgtgaacaaatactagtaaaacatgcgcaagaagaattaccgccgccgccgccgcaaaaaaaacgtcaaataacggttgatacgctagaacgtctacaagaactacaagaagcgacggatgaattagatttaaaattacgtcaagcggaagtaataaaaggttcgtggcaaccggtaggtgatttattaatagattcgctacaagatcatttagaaaaagttaaagcgctacgtggtgaaatagcgccgctaaaagaaaatgtatcgcatgttaatgatctagcgcgacaattaacgacgctaggtatacaactatcgccgtataatttatcgacgctagaagatttaaatacgcgttggaaattattacaagtagcggtagaagatcgagttcgacaattacatgaagcgcatcgtgattttggtccggcgtcgcaacattttctatcgacgtcggtacaaggtccgtgggaacgtgcgatatcgccgaataaagtaccgtattatataaatcatgaaacgcaaacgacgtgttgggatcatccgaaaatgacggaactatatcaatcgctagcggatttaaataatgttcgtttttcggcgtatcgaacggcgatgaaattacgacgtctacaaaaagcgttatgtttagatttattatcgttatcggcggcgtgtgatgcgctagatcaacataatttaaaacaaaatgatcaaccgatggatatactacaaataataaattgtctaacgacgatatatgatcgtttagaacaagaacataataatctagtaaatgtaccgttatgtgtagatatgtgtttaaattggctactaaatgtttatgatacgggtcgtacgggtcgaatacgtgttctatcgtttaaaacgggtataatatcgttatgtaaagcgcatctagaagataaatatcgttatttatttaaacaagtagcgtcgtcgacgggtttttgtgatcaacgacgactaggtttattattacatgattcgatacaaataccgcgacaattaggtgaagttgcgtcgtttggtggttcgaatatagaaccgtcggttcgttcgtgttttcaatttgcgaataataaaccggaaatagaagcggcgttatttctagattggatgcgactagaaccgcaatcgatggtttggttaccggttttacatcgagttgcggcggcggaaacggcgaaacatcaagcgaaatgtaatatatgtaaagaatgtccgataataggttttcgttatcgttcgctaaaacattttaattatgatatatgtcaatcgtgttttttttcgggtcgagtagcgaaaggtcataaaatgcattatccgatggttgaatattgtacgccgacgacgtcgggtgaagatgtacgagattttgcgaaagtattaaaaaataaatttcgtacgaaacgatattttgcgaaacatccgcgtatgggttatctaccggtacaaacggtactagaaggtgataatatggaaacggatacgatg

SEQ ID NO: 251264 - DNA, 3591 bp, synthetic construct
  misc_feature 1..3591: note = Description of Artificial Sequence: Synthetic coding sequence
  source 1..3591: mol_type = other DNA
atgctgtggtgggaagaggtggaggactgctacgaacgagaggatgttcagaaaaagactttcaccaagtgggtcaacgcacagttctccaagttcggcaagcaacatatcgaaaaccttttctccgatttgcaagacggccgacgattgctcgacctgctggagggtctgactggtcagaagctgccaaaggagaagggttcgaccagggtccacgccctcaataacgttaacaaggcattgcgcgtcctgcagaacaataatgtggacttggtgaacatcggttctacggacatcgtggacggtaaccacaaattgacccttggactcatctggaacattatcctgcattggcaggtgaagaatgtgatgaagaatatcatggcgggactgcagcaaaccaactccgagaagattcttctgtcctgggtgcgccaaagcaccagaaattacccacaggtcaatgtgatcaactttactacctcgtggtccgacggactcgctttgaatgcccttatccattcccacagaccggacttgttcgactggaactctgtcgtctgccaacagtccgcaactcaacggcttgagcatgcgttcaacattgcccgctaccaactgggtattgagaagctgctggaccccgaggatgtggacaccacttacccagataagaagtccatccttatgtacatcacttcgctgttccaagtgcttccacagcaagtctccatcgaggccattcaggaagtggaaatgcttccacgcccgcctaaagtgaccaaggaagaacacttccagctccatcaccagatgcactattcgcaacaaatcaccgtttcactcgcccaaggctatgagcggacgtcgtcgccgaagcctcgctttaagtcatacgcctacactcaagcggcgtacgtcaccacctccgatccaacccgatctccgttcccgtcccagcacttggaagccccggaagataagagtttcggttcatcactgatggagtctgaagtgaacctggaccgataccaaactgctcttgaagaggtgttgagctggctcctgtcggcggaggatactctccaagcgcagggcgaaatctctaatgacgttgaagtggttaaagaccagttccacacgcatgaagggtacatgatggacctcaccgcccaccaggggcgagtggggaacattctccagctgggatccaaactgatcgggactggaaaactgtcggaggacgaagagactgaagtccaagagcagatgaacctcctcaactccaggtgggaatgcttgcgcgtggccagcatggaaaaacagagcaacctgcatagagtgctgatggacttgcaaaatcagaagctcaaggaactgaacgactggctgaccaagaccgaggagcggactcgcaaaatggaggaggagccgctcggaccggatctggaagatctgaagcggcaggtgcagcagcacaaggtgctgcaggaagatctggaacaggaacaggtccgcgtgaattcactgacccatatggtggtcgtggtggacgaaagctccggagatcacgcaaccgccgcgctggaggaacagcttaaagtgctgggagacagatgggcgaacatctgccgctggactgaggacagatgggtcttgctgcaagatatcctgctcaaatggcagcgactgaccgaagaacagtgtctgttttcagcctggctgtcggagaaggaagatgccgtgaacaagatccatactactggcttcaaagatcaaaatgaaatgctgagctccctgcaaaagctcgcggtgctgaaggcagatctggagaagaagaagcagtcgatgggaaagctgtactcgttgaaacaggatttgctgagtaccctgaaaaacaaatcagtcacccaaaagactgaggcttggcttgataacttcgcgcgctgttgggataacttggtgcagaaactggagaaaagcaccgcacagatctcccaagcagtgaccaccacccagccgtcgctcacccaaactactgtgatggaaaccgtgactacggtaactaccagagaacaaatcctggtgaagcacgcgcaggaggagctgcctccgccgcctcctcaaaagaagaggcagatcaccgtcgacactcttgagcggttgcaggagctgcaggaggccaccgatgagttggatctcaagctcagacaagctgaagtcattaagggctcgtggcaaccagtcggtgatctgctcatcgacagcttgcaggatcacctcgagaaagtcaaggcgctgcgcggcgagatcgcgcctctgaaggaaaacgtgtctcacgtgaatgatctcgctagacaactcaccaccctgggaatccagctctcgccgtacaatctgtccactctcgaggatctgaacactcggtggaaactcctgcaggtcgcggtggaggatcgggtgcgtcaactgcatgaagcccaccgtgatttcggaccggcgtcgcaacacttcctttcaacgtccgtccagggaccctgggaacgcgccatctcgcccaacaaggtcccgtactacatcaatcatgagactcaaacgacttgctgggaccaccctaaaatgactgaactgtaccagtcgctggccgatctgaataatgtgagattttcggcttataggacggccatgaaacttcggcgcctgcagaaggccttgtgcctggatctcctgtcactgtcggcagcgtgcgatgccttggaccaacacaacctgaaacagaatgaccaacctatggacatcctccaaatcatcaactgccttaccaccatctacgatcgcctggaacaggagcacaataatctcgtcaacgtcccgctgtgcgtggatatgtgtctgaactggctccttaacgtgtacgacaccggaagaaccggacggatccgcgtgctcagcttcaaaacgggaatcatctcactgtgcaaagcgcacttggaagataagtaccggtacctcttcaagcaggtggcctcctctaccggattttgtgatcagcgccgcctgggactcctgctccatgactcaattcagatcccaaggcagctgggagaggtggcctcattcggtgggagtaatatcgaaccgtcagtgcgcagctgctttcagttcgccaataacaaacccgagatcgaagctgcgctctttctggactggatgcgcctggagccacagtcaatggtctggctcccggtgcttcatcgcgtggccgcagccgaaacggccaagcaccaggctaagtgcaatatctgcaaagaatgccctatcatcggattcagatacagaagcctgaaacactttaactacgacatctgccaatcgtgtttcttttccggaagagtcgctaagggacacaaaatgcactaccccatggtggagtactgcacgcctacgacttccggggaagatgtccgggacttcgccaaggtccttaagaacaagttcaggaccaagcgctatttcgccaaacacccacgcatgggctacctccccgtgcagaccgtactcgaaggcgacaacatggaaactgacaccatg

SEQ ID NO: 251265 - DNA, 3591 bp, synthetic construct
  misc_feature 1..3591: note = Description of Artificial Sequence: Synthetic coding sequence
  source 1..3591: mol_type = other DNA
atgctttggtgggaagaagtcgaagactgttatgaaagggaagacgttcagaaaaagactttcacaaaatgggtaaacgcacagttttccaaattcgggaaacaacatattgagaatctctttagcgatcttcaagacggccgccgccttctggacttgctggagggcctgactggtcagaaacttcccaaggagaagggctcaacgcgagtgcatgccttgaataacgtgaataaagcgctacgtgtcctgcagaataataatgtcgacctggtcaacatcggatctactgacatcgttgatggaaaccataaattgacgttagggctgatctggaacattatcctgcactggcaggtgaaaaatgtgatgaaaaatataatggctggtttgcagcagacgaactctgaaaaaatcctgctcagctgggtgcggcagagcactcggaattatccccaggtaaatgtaatcaactttaccacctcctggagcgatggcctggcattgaacgcacttattcatagccatcgacccgacctgtttgattggaattccgtcgtatgccagcagagcgctacacagaggcttgaacatgcttttaatatagcacggtatcagctcggcatagagaagctgctcgacccagaggacgtcgacacaacataccctgacaagaagtcaatcttaatgtacattaccagcctgttccaggtgcttccccagcaggtaagtatcgaggcgattcaagaagttgagatgttgccacgccccccaaaggtgaccaaggaagagcactttcagttgcaccaccagatgcactacagccagcagattacagtgagcctggcacagggctacgaacgcacttcttctcccaagccacgctttaagtcttatgcctatactcaggctgcctacgtcacaacgtccgacccgactaggagcccatttccatcgcagcacctggaagctccggaagataagtccttcggctccagcctgatggaatccgaagtcaacctggatcgctatcagaccgctttagaggaggtcctaagctggttgctgtctgcggaagacaccctccaggcccagggagagattagcaatgacgtcgaggtggtcaaagaccagttccacacacatgaaggctatatgatggatcttactgctcaccaagggagagtgggtaatatcctgcaacttgggtctaaactgatcggcaccggcaaactcagcgaagacgaagagactgaagttcaggaacaaatgaacctgctcaattcccggtgggaatgcctcagagttgcaagcatggagaagcagagcaacttacaccgcgtgctcatggatctgcagaatcagaaactgaaggaactcaacgactggctgacaaagaccgaggaaaggactagaaaaatggaggaggaacccctgggtcccgatctggaggatttgaagaggcaggtgcagcagcataaggtgctgcaggaagacctggaacaggagcaagtacgcgtcaattcactaacacatatggttgtcgtcgtcgatgagtcatcaggggaccacgcaacggccgcgcttgaagaacagcttaaggtgctgggggataggtgggccaacatatgtcgttggacagaggacaggtgggtgctgctgcaggacatcttgctgaagtggcagcgtttgacagaggaacaatgcctgttttccgcttggctttccgagaaagaagacgccgtgaataagatccacacaacaggattcaaggatcagaacgaaatgctgtcttctctccagaaactggcggtgctgaaagcagacttggagaagaaaaaacagtctatgggaaaactctactcccttaaacaggacctactcagcacgctgaaaaataagagcgtcacccagaagaccgaggcatggttggacaatttcgcacgatgctgggacaacctcgtgcagaagctggagaaaagtacagcccagatcagccaggctgttacaaccacacagcccagcttgacgcagaccaccgttatggagaccgtcactacggtgactacacgcgagcagatcctcgtgaaacacgcacaggaagaactgccaccaccacctccccaaaagaagagacagattactgtggacactttggagagactgcaggaactgcaggaggcaacagacgagttagatctgaagctgcgccaggccgaagttataaaaggttcctggcagccagtgggtgatcttttgattgactcgcttcaagaccacctggagaaggtgaaggctttgagaggtgagatagcgcctctgaaggaaaacgtgtctcacgtgaacgacctggctcgacagctcactaccttgggtatccagctgagtccatataacctgagcaccttggaggaccttaatacacggtggaagttgcttcaggttgctgtggaggatagggtgcgccaactgcacgaggctcatcgagattttggtccggcttcacagcactttctcagcacctccgtacagggcccttgggaaagggctatttcacccaataaggtcccctattatatcaatcatgaaacgcagacaacctgttgggatcaccccaagatgacagagctctaccaatcactggcggatctcaacaatgtcagattttccgcctataggaccgccatgaagctgagacgcttacagaaagccttgtgcttggatctgctcagcctgtcggcggcttgcgatgcactggatcagcacaatcttaagcagaatgaccagccaatggacatcctgcagataattaattgtctgacaacaatctatgataggctggaacaggaacacaacaatctcgtcaatgtgcccttgtgcgtcgatatgtgtctgaactggctcctcaatgtgtatgacacaggcaggacagggcgtatccgggtgctgagtttcaaaacaggcatcatttccctgtgtaaggcccacttggaagacaaatacagataccttttcaaacaagtggcgagcagtaccggcttttgtgatcaacggcgactgggtcttctcctgcacgatagcatacagattcctcggcagcttggagaggtcgcgtcctttggcggcagtaacatcgaacctagcgtacgctcttgcttccagttcgctaataacaaacctgagatcgaggccgctctcttcttggattggatgaggttggagccacagtctatggtgtggctgcctgtgctccatcgagtcgctgctgctgaaacggcaaaacaccaggccaagtgcaacatctgtaaggagtgtccaatcataggtttccgctatcgctccctcaaacactttaactatgatatctgccagagctgcttcttctccgggagggttgccaaaggccacaaaatgcactatcccatggttgaatactgcacaccaactacatctggagaagatgttcgggacttcgccaaagttctcaagaacaaattccggaccaagcggtactttgctaaacaccctcggatgggctacctcccggttcagactgttttggagggtgacaacatggagacagataccatg

SEQ ID NO: 251266 - DNA, 3591 bp, synthetic construct
  misc_feature 1..3591: note = Description of Artificial Sequence: Synthetic coding sequence
  source 1..3591: mol_type = other DNA
atgttgtggtgggaggaggtggaggattgttatgaacgggaggatgtgcaaaagaagacctttaccaaatgggttaatgcccagttctccaagtttgggaaacaacacattgagaacttattctccgaccttcaggatggcaggcgactgctggatctgctggagggcctcaccggccagaagctgccaaaggagaaaggatctacgcgtgtccacgctctaaacaatgtgaataaggccctcagggtgctgcaaaataataatgtggatctggttaacatcggaagcaccgatatcgtggatggaaaccacaagctcacactggggctgatatggaatattattctacactggcaggtgaagaacgttatgaagaacatcatggcggggctacagcagacaaactcagagaagatactgctgtcttgggttcgccagtctactaggaattatccacaggtgaatgtaataaacttcaccacgagttggtcggacgggttggctttgaatgcacttattcatagccacagaccagatttgttcgattggaactctgtggtttgtcagcagtcagcaacgcagagattggagcatgctttcaacattgccaggtatcagctgggcattgaaaagttgctagatcctgaagatgtcgataccacgtatcctgacaagaaaagtatactgatgtacattacctcgctgtttcaggtgttaccacagcaggtctctatcgaggccatccaggaggtggagatgctgcccaggccacctaaagttaccaaggaggagcactttcagctgcaccaccagatgcactactctcagcaaattaccgtatcattagctcagggctatgagaggacatcctcccccaaaccacgctttaaatcatacgcatacacgcaggctgcgtacgtaaccacaagtgatcctacacgatccccctttccctcccagcaccttgaggcccctgaggataaatcctttggcagttccctgatggaaagtgaggttaacctcgatcggtatcagactgctctcgaagaggtcctcagttggctgctctcagcagaggacacgctgcaagcccagggggaaatcagcaatgatgtggaggtggtgaaagaccaatttcatacgcacgagggatatatgatggacttaactgctcaccagggaagagtaggaaacatactccaacttggctcaaagctgataggaacagggaagctcagtgaggacgaggaaacagaagtgcaggaacaaatgaacctcctgaatagccggtgggagtgtttacgagtcgcctcgatggagaagcaaagtaatctgcatcgcgtcttaatggacctccagaatcagaaacttaaggaattgaatgattggctcaccaagacggaagagagaacccggaagatggaagaggagcccctaggtcctgacctggaggacctgaagagacaggtccagcagcacaaagtcctgcaagaggacctggaacaggagcaggtccgagtaaacagcctgacgcatatggtagtggtggttgatgagagttcaggtgaccacgccacagccgccctggaagaacaactgaaggttctgggtgatagatgggctaacatctgtagatggacagaggataggtgggtcttgctgcaggacatcctgctgaagtggcagcgattaaccgaggagcagtgcctgttcagcgcctggctgtccgaaaaggaggacgcagtgaacaagatccacacaaccggattcaaagatcagaacgagatgttgtcgtcgctgcagaagctcgcagttcttaaagcagatttggaaaagaagaagcagtctatgggcaagctttacagcctcaagcaagatttgctgagtactctgaagaataagagcgtgacacagaaaaccgaagcctggctggataatttcgctaggtgttgggataatctcgtgcaaaagttggagaagagcaccgctcagatctcccaagctgtgaccacaacacagccgagtctcactcaaactaccgtgatggagaccgtcactaccgtgacaacacgcgaacagatcctcgtcaagcatgcccaggaagagttgccgccccctcctccccagaagaagcgacagatcacagtcgataccctagagcgcttgcaggagcttcaggaggccacagacgagctcgacttaaagttgaggcaggccgaggttattaagggctcatggcagcccgtgggggatctgctaatcgacagtctccaggaccacctggagaaagtgaaagccttgagaggggagatcgcgcccctgaaagagaatgtttcccacgtgaatgatctggcccggcagctcacaacgctggggatccaactgtccccctataacctttctaccctggaagatttgaatacccgctggaaacttctccaggtggccgtggaagatcgggttaggcagttgcatgaagcccatcgagattttgggcccgccagccagcacttcctatcaaccagtgtgcaaggcccctgggagcgagctatctcccctaacaaggtgccctattatattaatcatgagacgcaaacaacctgttgggaccaccccaagatgacggaactctatcagagtttagcggacctgaataacgtgagattttcagcctaccgtaccgcaatgaagctgagacggctgcagaaagcattgtgcctggatctactgagcttaagcgcagcctgtgatgccctggatcagcacaatctcaaacagaatgatcagccaatggatattctccagatcatcaactgtctcaccactatatacgatcgcctcgagcaggaacataataacctcgttaatgtgcctctgtgcgttgacatgtgtcttaattggctgcttaatgtctacgacacaggccgtaccggtcggattcgcgttttgagttttaaaacaggaattatctccctgtgcaaggcgcacctcgaggacaagtatcgctacctgtttaaacaggtcgcatcttctactgggttctgcgaccaaagaaggctcggcctgctcctccacgattcgatccagattccccgtcagctgggtgaagtggccagctttggcggctctaacatcgagccaagtgtccgcagttgcttccaatttgctaacaacaagcccgaaatcgaggctgcgctgtttctagattggatgaggctagaacctcagtcaatggtgtggttaccagtcctacaccgcgtggcagcagccgagacagccaagcaccaggcaaagtgcaatatatgtaaagagtgcccgataattggctttcgataccgttcactgaagcattttaattatgatatatgccagtcctgttttttttccggacgcgttgccaagggacataagatgcattacccaatggtcgagtattgcacccctacgacatccggggaagatgtgcgagattttgccaaggttctgaaaaacaagtttcggacaaaacgctatttcgccaaacaccctcggatgggctatctaccggttcagaccgtgctggagggagacaacatggagactgataccatg

SEQ ID NO: 251267 - DNA, 3591 bp, synthetic construct
  misc_feature 1..3591: note = Description of Artificial Sequence: Synthetic coding sequence
  source 1..3591: mol_type = other DNA
atgctctggtgggaagaagtcgaggactgctatgagcgtgaggatgttcagaaaaaaacctttactaagtgggtgaacgcgcagttcagtaaattcggcaaacagcatatcgaaaatttgttctccgacttacaggatggaaggcggctcctagatctgctggagggtctgaccggacagaaactgccaaaagaaaagggctcaaccagagtgcatgccctgaataacgtgaataaagccttgcgcgtgctgcaaaataacaacgtggatctggttaacatcggctcaaccgacatcgtggacggcaaccataaactcaccctgggactgatatggaacatcatacttcactggcaggtgaaaaacgtgatgaagaatatcatggccggtctgcagcagacaaattcagagaagatccttctctcctgggtcaggcagtctacccggaactatccccaggtgaatgtgattaattttactacaagttggagtgacggactcgccctgaacgctctcattcactctcacaggcccgacctctttgactggaattccgttgtctgccagcagtcagccacccagagactggagcacgctttcaatattgccaggtatcagctgggcatcgaaaagctgctggaccccgaggatgtggacactacttatccagataagaagtcgattttgatgtatatcacaagtctcttccaggtcttgccgcagcaggtctctatcgaagccatccaggaagtcgaaatgctcccaagaccacctaaggtcactaaagaggaacactttcagctccatcatcagatgcactacagccagcagatcaccgtgagtcttgcccaggggtacgagagaacgagtagccctaagcctagatttaagagttacgcctatacccaggctgcttacgtcaccactagtgacccaacgcggtctccgttcccaagccagcacctggaggctcccgaagataaatctttcgggtccagcttgatggagtccgaggtcaatttagatcggtatcagaccgcacttgaggaagtgctttcatggcttctgtccgcagaagatacgctgcaggcacagggggagatcagtaatgatgtcgaggtagtaaaagatcagttccatacacacgaaggctatatgatggacttgactgctcatcaaggaagggtgggaaacattctgcagctcgggtcaaaactgatcggcactggaaagctgtccgaagacgaggagaccgaggttcaggaacagatgaacctgctgaactcgcgttgggagtgtttgcgagtcgccagtatggaaaagcagagcaacttgcatcgggtcttgatggatctgcaaaatcaaaaattgaaagagctgaacgattggctcaccaagaccgaagagagaactcgcaaaatggaggaagagccacttggcccagaccttgaggatctgaagcgacaagttcagcagcataaagtactccaagaagacctggagcaggagcaggtgcgagtaaatagcctgactcatatggtggtggtggttgacgagagctccggagaccacgccactgccgctctggaagagcagctgaaagtcctcggcgaccgctgggcaaatatttgccgctggactgaggaccgatgggtactgctccaggatatcctattgaagtggcagcggctgaccgaggaacaatgtttgttttctgcgtggctgtccgaaaaggaggatgctgtaaataagatccacacaaccggatttaaagaccaaaacgaaatgctgtcctctctgcagaaactcgcggtcctgaaagcagatctggagaagaaaaagcagtcgatggggaaattatactctctcaagcaggatctgctcagcaccctgaaaaacaagagtgttacgcagaagacagaggcgtggctggacaatttcgccagatgctgggacaatctcgtgcaaaagttagaaaagagtacagcccagattagccaggctgtgacgaccacccagcccagtctcacccaaaccacagtgatggagactgttacaaccgtgacaactcgtgaacagatactagtaaagcatgcccaagaggaactgccaccgccacctccacagaagaagaggcaaatcactgtggacactttagaaagactgcaggaactgcaagaggctaccgacgagctggatctgaaactgaggcaggctgaagttatcaaagggtcttggcagccagtgggggatctgcttattgacagcctccaggaccatctagaaaaagttaaggctctgaggggcgagatcgcacctctgaaggagaatgtgtctcacgtcaatgacctggcgcggcagttaaccacactgggtatccagctctccccgtataatctctccacactagaggacttgaacactcggtggaagctgctccaggttgccgttgaggacagggttcgacaactgcacgaggcgcatagagacttcgggcccgcttcacagcatttcctcagcaccagcgtccaaggcccatgggaaagggccatcagccccaataaggtaccctattacatcaaccatgagacgcagaccacctgctgggatcatcctaaaatgacggaactataccaatctcttgccgacctaaataatgttcgattcagcgcctataggacagcgatgaaacttaggcgcctgcagaaggccttgtgtctggatttgctaagtctgtccgccgcctgtgacgcgctcgaccaacacaatctgaagcagaacgaccagcccatggacattcttcaaatcatcaactgtctaactaccatatacgatcgcctcgagcaagaacataacaaccttgtgaatgtgcccctgtgcgttgacatgtgcttgaactggctgttgaatgtatacgacacaggacggacgggacgcatccgcgtgcttagcttcaagaccgggattattagtctttgcaaagcccacctcgaggataagtataggtatctattcaagcaagtggcctcttcaacagggttttgcgatcagcggaggttgggccttctgttgcatgattctatccagatcccacgtcagttgggtgaagtagctagttttggcggaagtaatattgagccaagcgtgcgcagttgcttccagttcgccaataacaaacccgaaatagaggccgcgctcttcttagattggatgagactagagccacagtcgatggtgtggctgccagtcctgcacagggtggctgcagcggagactgctaaacaccaggctaagtgtaatatctgtaaagagtgtcccataataggctttaggtataggtcactgaagcacttcaattatgatatctgtcagtcatgctttttcagcggccgagtggcaaaggggcataagatgcactatcccatggtcgaatactgcacccccacaacttctggtgaggatgttcgggacttcgccaaagtgttaaagaataagttccgcaccaaacggtattttgccaagcatccgcgaatggggtacctgcccgtgcagactgtccttgaaggagacaacatggagacggacaccatg

SEQ ID NO: 251268 - DNA, 3591 bp, synthetic construct
  misc_feature 1..3591: note = Description of Artificial Sequence: Synthetic coding sequence
  source 1..3591: mol_type = other DNA
atgctgtggtgggaagaggttgaggattgctatgagagggaagacgttcaaaaaaaaacctttaccaaatgggtgaacgcccaattctccaagttcggtaagcagcatatcgagaacctgttctctgatttgcaggacggccgtcggcttctggatctgcttgaggggctcacgggacagaaactgcctaaggagaagggaagcaccagagtccacgcgctgaacaacgtgaataaggccttgagagttctgcagaacaataacgttgatttggttaacattgggtcaactgatatagttgacgggaaccacaagttaacccttggcctgatatggaatataatactgcattggcaggtgaagaacgtgatgaagaatataatggcaggcctgcagcagacaaactccgagaagattctcctctcctgggtgcgccagagcacacgtaattacccccaggtgaacgtcattaacttcacaacctcctggtccgatggcttggcacttaatgccttgatacattcccatcggccggatctctttgactggaacagtgtggtgtgtcaacagagtgctacacagcgacttgagcacgcttttaacatagctagatatcagctagggatcgagaaactgctggatcccgaggatgtggatacgacctaccccgacaaaaagtccatcctcatgtacatcacttccttgtttcaggtgctgcctcaacaggtcagcatcgaggcaatccaggaagtggaaatgcttcccagacctcctaaggtgacgaaagaggagcacttccagctgcatcatcagatgcactactcacagcaaattacagtgtccctggcgcagggctacgaacgcacttcctctccaaagccaaggtttaagagttatgcttacactcaagctgcttacgtaacaacctccgacccaacccggtcgccttttcctagccaacacctggaggctcccgaggataaatcttttggctccagtctcatggagtccgaggtgaatctcgatcgctatcagacggcgctggaggaggtcctcagctggttgctgagtgctgaggataccctccaggcacagggtgaaatttccaacgacgtcgaagtggtcaaggatcagtttcatacacacgaagggtacatgatggatctgacagctcaccagggacgtgttgggaatatcctgcagttgggtagtaagctcatcggcacgggaaagctttccgaagatgaggagaccgaggtgcaggagcagatgaaccttctgaattctaggtgggagtgcctaagagtggcttcaatggaaaaacagagcaacctgcaccgggtgttgatggacctccagaatcaaaaacttaaggagttaaacgactggctgactaaaactgaggagagaacacgcaagatggaagaagagcccctaggacccgacctggaagacttgaagcgtcaagtgcagcagcacaaggtccttcaggaggacctcgaacaggagcaggtaagagttaactccctcacacatatggtggttgtggtagacgagagcagcggggaccacgcaaccgcagcccttgaggagcaactcaaagttctgggggaccggtgggcaaacatctgcaggtggacagaggatcggtgggtcttgctccaggacattctgctcaagtggcagcggttgaccgaagagcaatgtctcttttctgcatggttgagcgagaaagaagacgcggtgaacaagatacatacaaccgggttcaaagaccagaacgaaatgctgtcctcactacagaagttggccgtgctcaaggcggacttggaaaaaaaaaagcagagtatgggcaaattgtattcactcaagcaggatctcctgtccactctgaaaaacaaatcagttactcaaaagacagaggcttggctcgacaattttgctcgctgctgggataatctcgtgcagaagttagagaaaagtaccgcccagatatcgcaggccgttaccactacacagccctccttaacccagacaaccgtgatggagactgtgacgactgtgaccactagggaacaaattcttgtcaaacacgctcaggaagagttgccacccccaccaccacagaagaagcgacaaatcaccgtagatacgcttgaaagactgcaggagttacaggaggccaccgacgagctagaccttaagctcaggcaagcggaggtaatcaaaggaagctggcaacctgtgggggatcttctaatagacagcctgcaggatcacctggagaaggtgaaagcgcttaggggcgagattgcacctctcaaggagaacgtctcacatgtcaacgaccttgcacgtcagctaacaacgctgggcatacaactgagtccctataatctctcgacactggaggacctcaataccagatggaaactactacaggttgccgttgaagacagagtccggcagcttcatgaggcccatcgagatttcgggcccgcttcgcagcactttttgtcgacttcagtgcaaggcccctgggagagggccattagcccaaacaaggtgccgtactatataaatcatgagacacaaacaacctgctgggaccatccgaaaatgacagagttgtatcagtctttggcagatctgaataacgtcaggttctcagcatacagaaccgccatgaagttgcgcaggttgcagaaagccttgtgccttgacctcctgtctctgagcgctgcatgtgacgccctcgaccaacataacctaaaacaaaacgaccaacccatggacatccttcagatcataaattgcctgacaacgatctacgatagattggaacaggaacataacaatttagtaaacgtccctttatgtgtggacatgtgtcttaattggctgttaaatgtctatgatactggtaggacgggccggattagggttctctcatttaagacagggatcatctctctgtgcaaagcccacttagaagataagtacagatatctgtttaaacaggtggcctcgtctacggggttctgcgaccagcgcagattgggactcctgctacatgacagcattcagattccgaggcaactcggggaggtcgcatcatttggaggctctaatatcgagccctctgtgcgatcctgcttccagtttgcaaacaataaaccggaaatcgaggctgcactgttcctggactggatgcgactggaaccccaatcaatggtctggctccctgttctgcacagagtcgcggctgccgaaacagctaagcaccaggccaagtgcaatatttgtaaagaatgtccaatcattggtttccgatatagatcgttaaagcattttaactacgacatttgtcagtcttgtttcttctcaggccgggtggctaagggccataaaatgcattatccaatggtggaatattgtacaccaactacaagcggcgaagatgtgagggatttcgccaaggtccttaagaacaagtttcggaccaagcgatatttcgctaagcatccacggatggggtatctacccgtccagaccgtgttagaaggtgacaatatggaaactgataccatg

SEQ ID NO: 251269 - DNA, 3591 bp, synthetic construct
  misc_feature 1..3591: note = Description of Artificial Sequence: Synthetic coding sequence
  source 1..3591: mol_type = other DNA
atgctgtggtgggaggaagtcgaggactgttacgagagagaggacgtccagaagaaaacttttaccaaatgggtgaacgctcagttctcgaaattcggcaagcaacacatcgagaacctcttttccgatctgcaagacggtcgcagattgctggacctgttggagggactgaccggccaaaagctgccgaaggagaagggttcgactcgagtgcacgccctgaataacgtgaacaaggcacttcgggtccttcagaacaacaacgtggatctggtgaatatcgggtcgaccgacattgtcgacggaaaccacaaattgacccttggactcatctggaacatcatcttgcactggcaggtgaagaacgtcatgaagaatatcatggcaggactgcagcaaactaactccgagaagatcctgctgtcttgggtccgccagagcactcgcaattacccacaagtcaatgtgatcaatttcactacttcttggtcagacggcctcgcgctcaatgctcttattcatagccataggccggacctcttcgactggaactcagtggtctgccagcaatccgccactcagcggctcgaacacgcgttcaacatcgcacgttaccagctgggcattgaaaagctcttggatccagaagatgtggacactacctaccctgacaagaaatcgatcctgatgtatatcacgagcctgttccaggtgctgcctcagcaagtgtccatcgaagcgattcaggaagtggaaatgctcccacggccaccgaaggttaccaaagaagaacacttccagctccatcaccagatgcactattcgcagcagatcaccgtttcgctggcacagggttacgagagaactagctcgccaaagcctcggttcaagagctacgcctacactcaagccgcttacgtgaccacctccgatcccacccgatccccattcccgtcgcagcacctcgaagcaccagaggataagtcattcgggagcagcttgatggaatccgaggttaacctggacagatatcagactgccttggaagaggtcctgtcatggctgttgtcggcggaggacacgctccaagcccagggagagatctcgaatgatgttgaggtggtcaaggatcagtttcacacccatgagggatacatgatggacctgaccgctcatcaaggtagggtgggaaacatcctccagctggggtcgaaactgatcggcactggcaaattgtcggaagatgaggagactgaagtgcaggagcagatgaatctgctcaattcacgctgggagtgcctccgcgtggcgtcaatggaaaagcaatccaacctccatcgcgtgctgatggacttgcagaaccagaagctcaaagagttgaacgactggcttacgaaaaccgaagaaagaaccaggaagatggaggaagagcctctggggccggatctggaagatctgaagcggcaagtccagcaacataaagtgctccaggaagatctggaacaagaacaggtgagagtgaattcgttgacccatatggttgttgtggtggatgagagctcgggagatcacgccaccgcggcccttgaggagcagctcaaggtgctgggggaccgttgggccaatatctgcagatggacggaggatcgctgggtgctgctgcaggacatcctcttgaagtggcagagactgactgaagagcaatgccttttctccgcctggctctcggagaaggaggacgcggtgaacaaaatccacacgactgggttcaaagatcaaaacgagatgctgtctagcctccagaagttggcagtgctgaaggccgatttggagaaaaagaagcaatctatgggaaagctgtacagcctgaagcaagacctgctgtccactctgaagaataagtcagtgactcaaaagaccgaagcgtggctggacaatttcgcgcggtgctgggacaatcttgtccagaagctggaaaaatccaccgcgcaaatatcgcaggccgtcactaccactcaaccttctctcactcaaaccaccgtgatggaaactgtcaccactgtgactaccagagaacagatcctggtgaagcacgctcaagaagagctgccacccccgccgcctcaaaagaaacgccaaatcactgtggacactctggaaagactccaagaacttcaagaggccactgatgaactcgacctgaagttgaggcaggcagaagtgattaagggatcgtggcagccggtcggcgatctgctgattgactccttgcaagatcatctggagaaggtcaaggcgctgaggggagaaatcgcccctctgaaggaaaatgtctcgcacgtgaacgacctcgcccggcagctgaccacgctgggaattcagctctccccgtacaacctgtcaacccttgaagatttgaacacgcgctggaaactgctccaggtcgctgtggaagatagggtccgccaattgcacgaagcgcaccgggattttggacctgcctcccagcacttcctgagcacttccgtgcagggcccgtgggagagggccatctccccgaataaggtgccgtactacattaatcacgaaacccagactacgtgctgggatcaccccaagatgacggagctgtaccagtccctggcggatctgaacaacgtgcgcttctcggcctaccgcacggcgatgaaactccgacgccttcagaaggcgctgtgcctcgatctcctgtctcttagcgccgcgtgcgatgctctggaccagcacaacctgaagcagaacgaccaaccgatggacatactgcagatcatcaactgcctcactactatctacgacagactggagcaggagcacaacaatcttgttaatgtgcctctctgcgtggacatgtgcctcaattggctgctcaatgtttacgataccggtcgcactggacggatccgggtgctgagctttaagaccggaatcatctccctgtgcaaagcgcatctggaggataagtatcgctacctgttcaagcaggtcgcatcctccaccggcttctgtgaccaacggagactgggactgctcctgcatgactccattcagatccctcgacagctgggagaagtcgctagctttgggggcagcaacatcgaaccgtcggtgcggtcctgttttcaattcgcaaacaataagccagaaatcgaagcagccttgtttctggattggatgcgcctcgagccgcagtcaatggtctggctccccgttcttcatagggtcgccgccgccgaaaccgcgaagcatcaagcgaaatgcaacatctgtaaggaatgtcccatcattggtttccgctacagaagcctgaaacactttaactatgacatttgccaatcatgcttcttctctggcagagtcgcaaagggtcacaaaatgcattacccgatggtcgaatactgtactccgacgacctcgggagaagatgtgcgcgacttcgctaaggtcctcaaaaacaagtttcgaaccaaacgctacttcgccaagcatcctcgcatggggtacctgcctgtgcaaaccgtgctggaaggggataacatggaaaccgacacgatg

SEQ ID NO: 251270 - DNA, 3591 bp, synthetic construct
  misc_feature 1..3591: note = Description of Artificial Sequence: Synthetic coding sequence
  source 1..3591: mol_type = other DNA
atgctttggtgggaagaggtcgaggactgctacgagcgggaagatgtgcagaaaaaaacttttactaagtgggtgaatgctcagtttagtaagttcgggaagcaacacattgaaaaccttttctcggatcttcaggatggccggcgcctgctggacctactggaggggctgacaggccagaagctgcctaaggagaaagggtccacacgcgtgcacgcactaaacaatgtaaacaaggctctgagggttctgcagaataataacgtggacttggtaaacattggtagcaccgacatcgttgatggcaaccacaaactgacactgggcctcatctggaacatcatcctgcactggcaggtgaagaacgtgatgaagaatataatggctggcctgcaacaaacgaactctgagaaaattttgttgtcctgggtgcgtcagagcacgaggaactatcctcaggtgaatgtgataaatttcacaaccagctggagtgatgggctagctctgaacgccctgattcactcccaccggccagatctgtttgattggaattcagtcgtctgccaacagagcgcaactcaacgtcttgaacacgccttcaatatagccaggtaccagctcggcatcgagaaactccttgaccccgaagatgtggacacgacgtatccagataagaagtctatcctgatgtatatcacttcccttttccaagtgctcccccagcaggtaagcattgaggccattcaggaggtcgagatgctgccaaggccaccaaaggtaacaaaggaggaacactttcagctgcatcaccagatgcattattcccaacaaatcacggtaagcctggctcagggttacgagcgcacttcgtcccctaagcctagatttaagtcctacgcttacacacaagcggcctacgtgaccacttctgatccaacaaggtcaccctttccttcccagcatctagaggcgcctgaggacaagtccttcggctcgagtcttatggagtcagaagttaacctcgaccggtaccaaactgccttggaggaggtgctatcctggcttctcagtgcggaagatactctacaggcccagggcgaaatatccaatgacgtggaggtggtgaaggatcaatttcacacccacgagggctatatgatggatctgaccgcccatcaggggcgggtgggcaatattctgcagctagggtctaagctaatcgggacgggaaaactctcagaagacgaagaaacggaagtgcaggaacaaatgaacctgcttaatagcagatgggaatgtcttagggtagcctcaatggagaagcagagtaatctgcaccgcgttctcatggacctccagaatcagaagttgaaggagctgaatgattggcttacgaaaaccgaggagcggaccaggaaaatggaagaggagcccctcggcccggacctggaggatctgaaacgtcaggtgcaacagcacaaggtcctgcaggaggacttagaacaggagcaggttcgcgtgaacagcttaactcatatggttgtggtggtagatgaaagctccggagaccacgccaccgccgccctggaagaacagctcaaggtgctcggggaccgatgggccaatatctgtcgttggacggaggaccgctgggtcctgcttcaggatatcctgcttaagtggcagcggctcacagaggagcagtgccttttttctgcttggttatcggaaaaagaagatgccgtgaacaagatacataccactggcttcaaggaccagaacgagatgctctcatcattacaaaagctggcggtactgaaggctgaccttgaaaagaagaagcaaagtatgggtaaactttatagtcttaagcaggaccttctttctacactcaagaacaaaagcgtcacccagaagacagaggcatggttggacaattttgcgcggtgttgggacaaccttgtgcagaagctggagaagtctaccgcccaaatttcccaggccgtgacgaccactcagccctctttaacccagactacagttatggaaactgtaacgactgtcacaacccgagagcagattttggttaagcacgcacaggaggaactgcctccgccgccgcctcaaaaaaaaaggcagatcacagtagacactctcgaaaggctgcaggagttacaagaagccaccgatgagctggaccttaaactgagacaagctgaagtgatcaaggggtcttggcagcccgttggggatttgctgattgattcgttgcaggaccacttggagaaggtgaaggccttaaggggggaaatcgctccactgaaagaaaacgtctcccacgtgaacgaccttgctcgacaactgacaactcttggaattcagctctcaccttacaaccttagcacactcgaagacctcaacactcggtggaaattgctgcaggttgccgtcgaggatcgggtgagacagcttcacgaggcccaccgcgacttcggacccgctagtcagcactttctgtctacatccgttcagggaccatgggaacgggccatctctcccaacaaagtcccctactatataaatcacgaaacgcagacaacatgctgggatcaccctaagatgaccgagttgtatcaatcactggcagaccttaacaatgttcggttttctgcttacaggaccgccatgaaattaaggcgactccagaaggccctctgtctcgacctgctgtctctttctgctgcctgcgacgcactggatcagcacaatctgaaacagaacgaccagcctatggacatcctgcagattattaactgcctgactacaatctacgaccgattagaacaggagcacaacaacctggtgaacgtgccactgtgtgtcgacatgtgcctgaactggctgctcaacgtctacgacacaggccgaactggaagaatcagagtcctctcattcaaaacgggaatcatcagcctgtgcaaggctcatctggaggacaaatatcggtacctgtttaagcaagtggcctctagtactggattttgcgaccaaagacggctggggctcttacttcacgactccatacaaatcccacgccagctgggagaggttgcgagcttcggcggtagcaacatcgaaccaagcgttcgcagctgctttcagtttgcaaataataagccagaaattgaggcggcgttattcctggattggatgcgccttgaacctcagtccatggtgtggctgcctgtgcttcaccgcgttgccgcagcagagacagccaaacaccaggctaaatgtaacatctgcaaagaatgtcccatcattgggttccgctatcggtcactgaaacacttcaactacgatatctgccagagctgcttcttttccggccgcgtagccaaaggacacaaaatgcactatccaatggtggaatattgcacgcccacaacctctggggaggatgtaagagattttgcgaaggtgctcaagaacaagtttaggactaaaaggtatttcgcgaagcatccacggatgggctacctgccggtacaaacagttctagagggggacaatatggagaccgacacaatg

SEQ ID NO: 251271 - DNA, 3591 bp, synthetic construct
  misc_feature 1..3591: note = Description of Artificial Sequence: Synthetic coding sequence
  source 1..3591: mol_type = other DNA
atgctgtggtgggaggaggtggaggattgctacgaaagggaggacgtccagaaaaagactttcacgaagtgggtgaacgcccaattttcgaaatttggtaaacaacatatcgaaaacttgttttcggacctccaggacggcagacggctgctggaccttcttgaaggactgactggacagaaactcccaaaggaaaagggatcgactcgcgtccacgcgctcaataacgtgaataaggccctgcgcgtgctgcaaaacaacaacgtcgacctggtgaacatcggctccaccgacatcgtcgatggaaaccacaagctgaccctcggactgatctggaatatcatcctgcattggcaggtgaagaacgtgatgaaaaacattatggctggactccagcagactaattcagagaaaattctcctctcatgggtgcggcaaagcacccggaattacccgcaggtcaacgtgatcaacttcactacctcgtggtcagacggactggccctgaacgcacttatccactcccacaggcctgacctgttcgactggaactcagtggtctgccagcaatcagccacccagagactcgaacatgcgtttaacatcgcacggtaccagctggggatcgaaaagctgctggacccagaggacgtggataccacctaccctgacaaaaagtccatcctgatgtacattaccagcctgttccaggtgctcccgcaacaggtgtctatcgaggccattcaggaagtcgaaatgcttcctagaccaccgaaggtgacgaaagaggagcacttccaactgcaccatcagatgcattactcgcaacaaattaccgtgagcctggctcaaggatacgaaaggacctcctcccccaaaccgcggttcaagtcctacgcctatactcaggctgcatacgtgaccacctcagatccgacgcgctccccgttcccgtcacagcatctggaagcaccggaggataagtcattcggatctagcctgatggagtcggaggtcaatttggatcggtaccaaacggccctggaagaggtgctgtcgtggctcctgtcggccgaggatactcttcaggcgcagggcgagatctccaacgacgtagaagtggtcaaggaccagttccacacccacgagggatacatgatggacctgacggctcatcagggccgagtcggaaatatcctgcaactggggtcgaaacttattggtaccggaaaactgtcggaagatgaagagactgaagttcaggagcagatgaatctccttaattcgaggtgggagtgtctgcgcgtggcctcaatggagaagcaaagcaatttgcatagggtgttgatggatctgcaaaaccagaagctgaaggaactgaacgactggctgaccaaaactgaggaacggacccgaaagatggaggaggagccgctcggaccggacctggaagatctcaagcggcaggtgcaacagcacaaagtcctccaggaggatctggaacaagaacaagtgcgcgtcaacagcctgacccatatggtggtggtcgtggatgaatcatccggcgaccatgccaccgcagccctggaagaacaactgaaggtcctgggcgatagatgggcgaatatctgtcgctggaccgaggaccggtgggttcttctgcaagacatcctcctgaaatggcagcgcctgaccgaagaacagtgcctgttttccgcctggctgagcgagaaggaagatgctgtcaacaagatccacactaccggtttcaaagatcagaacgagatgctgtcgtcactgcaaaagctcgcggtcctgaaggctgatctggagaaaaagaagcaatcgatgggtaaactttacagtctcaagcaggatctgctcagcaccctgaagaataagtccgtgactcaaaagaccgaggcctggctggacaatttcgctcggtgttgggacaacctggttcaaaagctcgaaaagtcgaccgctcaaatctcacaggccgtcactaccacccaacctagcctgactcagaccacggtcatggaaaccgtcactaccgtgactaccagggaacagattctcgtgaagcacgcccaggaggaactgcccccgccgccaccgcaaaagaaacggcaaatcaccgtggacactctggagcgcctgcaggagctgcaggaagctacggatgaactggacctgaagctgcgccaggcggaagtgattaaaggctcgtggcagccagtcggagatctgctgatcgactcactccaagaccacctggagaaggtgaaggctctgcgcggcgagatcgctccgctgaaggaaaacgtctcacatgtgaatgatcttgcacggcagttgactaccttgggaatccagctttccccctacaatctcagcacgcttgaagatctcaatacgcgctggaagctgctccaggtggccgttgaggatcgggtgagacagctccatgaagcgcatagggattttgggcctgcctcgcagcacttcctgtccacctccgtccagggaccgtgggagcgggccatctcacctaacaaagtgccgtactatatcaatcacgagactcagactacctgctgggatcaccccaagatgactgaactgtaccaaagccttgccgacctcaacaacgtccggttttctgcgtaccgcactgctatgaaactgaggaggttgcaaaaggccctttgcctggatttgctgtccctctcggccgcatgcgatgctctggaccagcacaacctcaagcagaacgaccaaccaatggatattctgcaaatcatcaattgcctgactacgatctatgatcgcctggaacaggaacacaacaacttggtaaacgtgcctttgtgcgtggacatgtgtctgaattggctgctgaatgtgtacgatacgggacgcactggaaggatcagggtcctgtcgttcaagaccggcatcatctccctgtgcaaggctcacctcgaggacaagtatcgctacttgttcaagcaggtggcaagctctaccggcttctgcgatcagagacgcctcggcttgttgctgcacgactcaattcaaatcccgcgccagctcggagaggtggcgagtttcggcggctcaaatatcgagccatccgtgcggtcctgcttccaattcgctaataacaagcctgagatcgaagccgcgctgttccttgattggatgcggctcgagcctcagtctatggtgtggctgcctgtgttgcatcgggtcgcggccgcagagactgccaagcatcaagcaaagtgtaacatatgcaaggagtgcccgatcataggatttcgctacagatcattgaagcactttaactacgacatctgtcagtcctgctttttcagcggccgggtggctaagggacataagatgcactacccaatggtggagtactgcactcctaccactagcggagaggacgtccgcgactttgccaaggtgctcaagaacaagttcaggactaagcggtacttcgcaaagcatccgaggatgggatacctcccagtgcagactgtcctggagggcgataacatggaaaccgacacgatg

SEQ ID NO: 251272 - DNA, 3591 bp, synthetic construct
  misc_feature 1..3591: note = Description of Artificial Sequence: Synthetic coding sequence
  source 1..3591: mol_type = other DNA
atgctgtggtgggaagaagtggaagactgttacgaacgtgaagacgtgcagaagaaaacatttaccaagtgggtgaacgcacagtttagcaaatttggtaaacagcatatagagaacctattcagtgatctacaggatggccgaaggctgctggatctgctggagggactgactgggcagaagctgcccaaagagaagggctctactagagtacacgctctgaacaacgtcaacaaggctctgcgtgtgcttcagaataacaatgttgatctggtgaacatcggaagcacggacatagtggatgggaatcataaactgaccctgggcctcatctggaacatcattctgcattggcaggtgaaaaatgttatgaagaacatcatggcagggctccagcaaacaaacagcgaaaaaatcctgctctcctgggtgcggcagtccactagaaactatccccaggtaaacgttatcaacttcacaacttcctggtccgatggcctcgccttgaacgccctcattcactctcacaggcctgatctgttcgattggaatagtgtagtttgtcaacagtctgccacccagcgtctggaacacgcattcaacatcgccaggtatcagttggggattgagaagctgttagatcctgaggacgtggacacaacctaccctgacaaaaagagcatcctcatgtatatcaccagtttgttccaggtcctgcctcagcaggtaagcatcgaagcgatccaggaagtggaaatgctgccccgaccacccaaggtgaccaaggaggagcatttccagctgcaccatcagatgcattactcgcagcagattacagtgagtctggcccagggctacgaacggacttcatctccaaagcctagatttaaaagctacgcctacacgcaagcagcctacgttaccacttcagatcctacccgatcccctttccctagtcagcacctcgaggcgcccgaggacaagagctttggcagcagccttatggaaagcgaggtgaatttggaccgctaccagacagccctggaagaagtgttgtcctggttgttgtccgcagaggatacactgcaggcccagggagaaatttccaatgatgtggaggtcgtaaaagatcagtttcacacacacgagggctatatgatggacttgaccgcccaccaggggcgcgtgggcaacatcctacagctgggctccaagttaatagggacgggcaaactgagcgaagacgaagaaacagaagtgcaggagcagatgaatctgctcaattccaggtgggaatgcctcagggtagcttctatggaaaagcaaagcaatctccatcgtgtactaatggatcttcagaaccaaaaactcaaagaactcaacgactggctcactaaaactgaggaacgcactagaaaaatggaagaagagcctttgggcccagacctagaggacctgaaacgccaggtgcagcagcataaagtcctccaagaggatcttgagcaggagcaagtccgggtgaactccttaacccacatggttgttgtggtcgatgaatccagcggtgatcatgctaccgccgccctggaagaacagctgaaggtcttgggggatcgctgggcgaatatatgcagatggacagaagaccggtgggtcctcctccaagatatactgctcaagtggcagcgactcacagaagagcagtgtctcttctcagcttggctttccgagaaggaggatgccgtaaataaaatccacaccactggttttaaagaccagaatgaaatgttatcttcactgcagaaactagctgttctaaaagccgatctggaaaagaagaagcaatccatggggaagctgtatagtctcaaacaggatctgctgtcaacactgaaaaataagagcgtcacccagaagacggaggcgtggctagataatttcgcaaggtgctgggataacctggtccagaagctggagaaatctacagcccagatttcgcaggctgtcaccacaacacagccatctctcacccaaacgactgttatggagaccgtgactactgtgacaactcgggagcagatcctggtgaaacatgcccaggaggagctgccacctcctcccccccagaagaaacggcagatcacagttgacacacttgagagactgcaagagttacaggaggcaacggatgagctggacctgaagctgcgacaggccgaggtgatcaaaggttcttggcagccagtcggggacttactaatcgatagcctgcaagaccacctagagaaggtcaaggcgctccgtggcgagatagcaccgttgaaagaaaacgttagccacgtgaacgatttagcgaggcaattgacgaccctgggtattcagctatccccctataacctttctacactcgaagatctaaacacccgctggaagttgttgcaggttgctgtggaggatcgggtgcgccagctgcacgaggcgcaccgcgattttgggcctgctagtcagcacttcttgagcacgagcgttcagggaccttgggagcgggctatctcaccaaataaagtgccttattacattaatcacgagacgcaaacaacctgctgggatcacccaaagatgacagagttgtatcaaagcctggctgacctgaacaatgtccgcttctccgcctatagaaccgccatgaagctacgcagactgcagaaagccctgtgtttagacctgctgtcactgtctgctgcttgcgacgccctggatcagcacaacctgaaacagaacgatcaacctatggatattctgcagattatcaactgccttactacaatctacgacaggttggagcaggagcacaacaacttggtgaatgtgccactctgtgtggacatgtgtctaaattggcttttgaatgtttatgataccgggcggaccggccgcatccgagtgctgtctttcaagacaggcatcatttccctctgtaaggcccacctagaagataaatatcggtacctctttaagcaagtggcttcttccactggtttttgtgatcagagacggctgggcctgttgctgcatgactcaatccagattcccagacagttaggagaggtggcctcctttggcggtagtaatattgaaccatctgtgcgatcctgtttccagttcgccaacaacaaacccgaaatagaagctgctctgtttctggactggatgagactggaaccccagtccatggtctggctccctgtgttgcatagggtggcagctgcggaaactgctaagcaccaggcaaagtgcaatatctgtaaagagtgtcctatcatcgggttcaggtaccgctccctcaagcactttaactacgatatctgccagagttgctttttcagcggccgagtggcgaagggccacaaaatgcattaccccatggtggaatattgcacacctacaacatccggggaagatgtgcgggacttcgctaaagtgctcaagaacaaattcaggactaagcgctatttcgctaagcaccccaggatggggtatctacctgtgcagacagttcttgagggcgacaacatggaaaccgatactatg

SEQ ID NO: 251273 - DNA, 3591 bp, synthetic construct
  misc_feature 1..3591: note = Description of Artificial Sequence: Synthetic coding sequence
  source 1..3591: mol_type = other DNA
atgctgtggtgggaggaggtcgaggattgctatgaacgtgaagacgttcagaaaaaaacttttacgaagtgggtgaacgctcagtttagtaagtttggcaagcagcatatagagaacctctttagcgacctgcaggatggccggaggctgctggacttgctcgagggcctcactgggcaaaagctccccaaggagaaagggtctaccagggtgcatgcgctgaacaatgtcaacaaggcccttcgcgtgctccagaataacaacgtggatctggtgaatatcggctctactgacatagtcgacggaaatcacaagcttaccctgggcctaatttggaacattattctccactggcaggtaaagaacgtcatgaaaaacatcatggccggattgcaacaaactaatagcgagaagatacttctgtcttgggtgcgtcagtcaaccaggaactacccccaggtcaatgtcattaatttcacgacctcgtggagcgacggcttggccttgaatgcactgatccattctcatcgacccgatctgttcgattggaacagtgtggtgtgtcagcagagtgccacccagaggctagaacacgcattcaatatcgcccgctatcagctgggcatcgagaagctgctcgatcccgaggatgttgacacgacgtatccagacaaaaagagcattctcatgtacatcacatcactgtttcaagtcctcccacagcaagtttctattgaggctatccaggaggttgagatgctgccccgaccacccaaagtgaccaaggaggagcattttcaactccaccaccagatgcattattcccagcaaataaccgtttcactagcccaggggtacgagcgtacgagttctcctaagcctagattcaagagctatgcatacactcaggctgcctatgtcacaacttccgatcctacacggagcccttttcctagccagcacctggaggcccctgaggataagtccttcgggtcaagtttgatggaatctgaagttaacctggatagatatcaaaccgccttagaagaagtactttcttggctgctatcggccgaggacactctccaggcccagggcgaaatctctaacgacgtcgaagtggtcaaggaccaatttcacacgcacgagggatacatgatggatcttacagctcaccagggccgcgtgggtaatattctgcagttaggttctaagttgatcggcactgggaaactttctgaggacgaagaaacagaagtgcaggaacagatgaacctcctcaattccagatgggaatgtctacgcgtggcaagcatggaaaaacagtccaacctacaccgcgtcctgatggacttgcagaatcagaagctcaaagaactgaatgactggctcaccaaaaccgaggaaagaactcgcaaaatggaggaggaaccccttggacccgatctagaggacctcaaaagacaggttcagcagcacaaggttcttcaagaggacctcgagcaggagcaagtgagagtgaatagcttgacccacatggtggtcgttgtggatgagtcctccggtgatcatgcaaccgcggcattggaggaacagctgaaagtgctaggcgatcgctgggcaaacatttgccgctggactgaggaccgatgggtcttgttgcaggatatactcttaaagtggcagcggttaaccgaggaacagtgcctatttagcgcatggctgtctgagaaagaagacgcggtgaacaagattcatacaacaggattcaaggaccagaacgagatgctcagttctctccagaagttggctgtgttaaaggcagacttagagaaaaagaaacagtctatgggcaaactgtacagcctgaaacaagacctgctgagcaccctgaagaacaaatccgtcacccagaagacagaggcctggttagacaacttcgctagatgctgggataacctcgtgcagaaactcgagaaatcgacagcccaaatatctcaggctgtgacaacgacgcaacccagtttgactcagacgacagtgatggaaacagttaccactgttacaactagagaacagatcctagtcaagcacgcacaagaagagctccctcctccccccccacagaagaaaagacaaatcacagtcgacactctagaaaggctgcaggagcttcaggaggcaaccgacgagcttgatctgaagctgcggcaggcggaagtgataaaggggagttggcagccggtgggcgaccttttgattgattctcttcaggaccatctggagaaagtcaaagcgctccggggcgagatcgcaccgctaaaagaaaacgtgtctcacgtcaacgatcttgcccgccagctgaccacgctaggtatccagctgtcaccctataacctcagcaccttggaggacctgaacaccagatggaaattattacaggtggcggtggaggatcgtgttagacagctacacgaggcacaccgcgactttggcccagcatctcaacattttctgtccacctcggtgcaagggccgtgggagcgagcaatttctcccaacaaagtgccctactatatcaaccatgaaacccagaccacctgttgggaccaccctaaaatgactgaactgtatcagagcctggcggacctgaacaatgtgcgattttcagcctatcgaaccgctatgaagttacgcaggcttcagaaagcgctgtgcttagatctcctgagtctgtctgctgcctgcgatgcccttgaccagcacaacttgaaacagaatgaccagcctatggatattcttcagattattaactgcctgactacgatttacgaccgattggagcaggaacacaacaatttggtgaacgttcctttgtgcgtggacatgtgtctgaactggctcttgaatgtgtatgacactggccgaaccggccggattagagtgctttccttcaaaaccggcatcatatctttatgtaaagctcacttggaagacaaatacaggtacctgttcaaacaggtcgcctcaagtaccggcttttgtgatcagaggcgccttggtttgctcctacacgactcaattcaaattccgagacagctgggggaggtggcgtcattcggggggagcaacattgagccttccgtccggtcctgttttcagtttgcgaataataagcctgaaatagaagccgctctgttcctcgattggatgcgactcgaacctcagagtatggtgtggttgcccgttttgcaccgtgtggcagccgcagagacagcgaagcaccaagccaagtgtaatatatgcaaggagtgccccattattggattccggtacaggtccctcaaacattttaactatgacatatgtcagtcttgcttcttctcaggacgggttgccaagggtcataagatgcattacccaatggttgagtactgcacccctacaacttctggggaagatgtaagagacttcgccaaggtgctcaagaacaaattccggaccaaaagatatttcgctaagcatccccgcatgggctacttaccagtgcagaccgttctggaaggagataacatggaaacagataccatg

SEQ ID NO: 251274 - DNA, 3591 bp, synthetic construct
  misc_feature 1..3591: note = Description of Artificial Sequence: Synthetic coding sequence
  source 1..3591: mol_type = other DNA
atgctatggtgggaggaggtggaagactgttacgagcgtgaggatgtgcagaagaagacttttaccaagtgggtgaatgcccagttttcgaagtttggcaaacagcatattgagaacttgtttagcgatctgcaagatggtcgacgattgctggatctcctcgagggcctgacaggccaaaagctgcccaaggagaagggctcgacgcgcgtgcacgccctaaacaacgtgaataaggctctgcgcgtcctgcaaaataacaatgttgatcttgttaatatcggttcgaccgacattgtggacggaaatcacaaattaacactgggcttgatttggaacatcatactacactggcaggtgaaaaacgtgatgaagaatattatggctggcttgcagcagacgaactcggaaaagatattactgagttgggtgcgccaaagtacgcgcaactacccccaggtcaacgtgattaacttcacaacctcgtggtctgatggcctggctctgaacgctctgatccatagccaccgccctgacctgttcgattggaattccgtagtgtgccagcaatctgccacccagcgcctggagcatgcctttaacattgctcgctatcagctgggcatcgagaagttactggaccctgaggatgtggataccacctaccctgataagaaaagcatattaatgtacattacgtccctgttccaggtcctgccacagcaggtgtccatcgaggccatccaagaagtggagatgctgccgagaccgccgaaggttacgaaagaggaacattttcaactgcaccatcaaatgcactattcacaacagatcacagttagcctggctcagggctacgagcgcacaagttcccccaagcccaggttcaagtcatacgcatatacccaagctgcctacgttacgacctccgaccccacccgcagcccctttccgagtcagcatctggaggccccggaggacaagtccttcggatcctcgttaatggagtcggaagtgaatctggaccgctaccagacggcccttgaagaggtcctcagttggctgttgtccgcagaggacaccttgcaggcccagggcgaaatttccaacgacgtggaagtcgtaaaggatcaattccacacgcatgaggggtacatgatggatctcacggcacaccagggaagggtaggtaacatcctccagttgggcagcaaactgattggtaccggaaagctgtcggaggacgaggagaccgaggtacaggagcagatgaacctccttaatagtcgctgggagtgcctgcgggtggctagtatggagaaacagtccaatctccacagggtgctaatggacttacagaatcagaagctgaaggagctgaacgattggctgaccaagacagaggagcgcacgcgaaagatggaggaggagcctctggggcccgatttggaggatctgaagcgacaggtacagcaacataaggtcctgcaagaagatttggaacaggagcaagtgcgcgtaaattcccttacacacatggtggtggtggtggacgagagttcgggcgatcatgccaccgctgccctggaagagcaattgaaggtgctgggcgaccgctgggctaacatttgtcgttggacggaggatcgctgggtcctgctgcaggatattttgttgaaatggcaacgtcttaccgaagagcagtgcttgttcagcgcttggctgtccgagaaggaagacgcggtcaacaagatacatactacaggatttaaggatcagaacgagatgctctcgtccctgcagaagctggcggtccttaaggctgacctggagaaaaagaagcaatcgatgggcaagctctattcacttaagcaggacctattgtccacactgaaaaataagtcggtgacgcagaagaccgaggcgtggttagacaacttcgcacgctgctgggacaatcttgtacaaaaattggaaaagtcgaccgcgcaaatatcccaagctgttacgacgacccagccctccctgacgcagactaccgtgatggagaccgttactacagtgacgacgagggaacaaatcctagtaaaacacgcccaggaagagctgccccctcctccaccacagaagaaacgccagatcaccgtggataccctcgagcgactgcaggagctgcaggaagctacggacgagctcgatctgaagttacgccaggccgaagttatcaagggctcgtggcaaccagtgggtgacctactaatcgactccttgcaggatcatctggagaaggtcaaagcccttcggggagagatcgccccgctgaaagagaatgtgtcgcatgtgaacgatttggcacgtcaactcacaacattaggaatccagctgtctccctataatctgtcgaccttggaagatctgaatacccggtggaagttgctacaggttgcggttgaggatcgggtccgccagctgcatgaggcccaccgtgacttcggaccggcgtctcagcactttctcagcacctctgtacagggcccctgggagcgcgccattagccccaacaaagtgccttattacataaaccacgagactcagaccacctgctgggatcatcccaaaatgacggagctttaccagtcgctggccgatctgaacaatgttaggtttagtgcctaccgaaccgcaatgaagctgcggcgccttcaaaaagcactgtgcctcgatttattgtccctgtcagccgcgtgtgatgctctggaccagcacaacttgaagcagaacgaccagcctatggacattctgcagatcatcaactgccttactactatctatgatcgactcgaacaggaacataataacctggtgaatgtcccactgtgtgtcgatatgtgccttaactggctgttgaacgtctatgataccggccgcaccggtagaattcgagtcctgagcttcaagacaggaattatctcattgtgcaaagcccacttggaagacaaatatcggtacctgtttaagcaagtggcttcctccacgggcttctgcgaccagcgacggctgggtctcctacttcacgactcaattcagatccctaggcagcttggcgaggtggcgtccttcggggggtctaatatagaaccaagcgtacgctcctgcttccagtttgcaaataacaagccggaaattgaggccgccctgtttctggattggatgcgcttggagccgcagtctatggtttggctgcccgtgctgcaccgcgtggcagccgccgaaaccgccaagcaccaagccaaatgtaatatatgtaaagagtgccccattattggcttccgatatcgatccctaaagcatttcaactacgacatctgccaatcctgcttcttttcaggccgcgtcgccaaaggacataagatgcattaccctatggttgagtattgcactcccaccaccagtggtgaggacgtacgggactttgcgaaggtcttgaagaacaagttccgaacgaagcgatactttgcgaagcatcctagaatgggctacctcccggttcagaccgtcttggaaggagataacatggaaacagatactatg

SEQ ID NO: 251275 - DNA, 3591 bp, synthetic construct
  misc_feature 1..3591: note = Description of Artificial Sequence: Synthetic coding sequence
  source 1..3591: mol_type = other DNA
atgctgtggtgggaggaagttgaggactgctacgaacgggaagatgtgcagaaaaagacctttactaagtgggtgaacgctcaattctctaaattcgggaagcagcacatcgagaacctgttttcggatctgcaggacggacgccgtctgttggacctgctggaaggactgactggccagaagttgccgaaagagaagggttctacccgcgttcacgccttgaacaacgtgaataaggcgctgcgcgtcctgcagaacaataatgtggacctcgtgaacatcggatccaccgacatcgtggacggaaatcacaaactgactctgggcctgatttggaacattatcctccactggcaggtaaagaatgtcatgaaaaacatcatggccgggctgcaacaaactaactccgaaaagatcctgctgtcgtgggtgagacaatcgactcgcaattatcctcaggttaatgtgatcaacttcactacctcgtggtctgatgggctggcactgaatgccctgatccattcgcaccgcccagacctgttcgattggaattcggtggtgtgccagcagtcggcgacccagagactcgaacacgctttcaatatcgcgcgctaccagctgggaatcgaaaagctgttggacccggaggacgtggacacgacctacccggacaagaagtcgatcctgatgtacattacttcgctgtttcaggtgctgccacagcaagtgtccatcgaggcaatccaagaagtcgaaatgctccctaggcctcccaaggtgaccaaggaggaacacttccaactccatcaccagatgcactacagccagcagatcactgtgtcattggcacagggttacgagcgcacctcctcgccaaagcctaggttcaagagctatgcatacactcaagcggcctatgtaaccacgagcgacccgaccagatccccgttcccgtcacaacatctggaggcaccggaggacaagagcttcggatcgtcgctcatggagtccgaagtgaacctcgacagataccagactgccctggaggaggtcttgtcttggcttttgtcggcggaagatactctgcaagcgcaaggggaaatctcaaatgatgtcgaggtggtgaaagaccaattccatacccatgagggatacatgatggatcttacggctcaccagggaagggtgggcaacattcttcagcttggatctaagctgattggaaccgggaagctgtcggaggacgaggaaactgaagttcaggaacagatgaatctcctcaacagccggtgggagtgcctccgagtggcatctatggagaagcagtcgaacctccaccgggtcttgatggatctgcaaaatcagaaactgaaagaacttaatgactggctcaccaagactgaagagagaaccaggaagatggaggaggagccgttgggaccggacctcgaagatcttaagcggcaggtgcagcagcacaaggtgcttcaggaggatctcgagcaagaacaggtgcgggtcaactcactgacgcacatggtggtggttgtcgacgagtcgtctggagatcatgccactgccgctctcgaagagcaactcaaggtccttggcgatagatgggccaacatttgccgctggactgaagatcggtgggtgctgctccaagatattcttctgaagtggcagcgcctgaccgaagagcagtgcctgtttagcgcatggttgtctgaaaaggaagatgccgtgaataagatccacaccaccggattcaaagatcaaaacgaaatgctgagctcactgcaaaagctcgctgtgctgaaagcagatttggagaagaagaaacagtcgatgggaaaactgtactccctgaaacaagatctgttgtcaacccttaagaacaagtccgtgactcagaaaaccgaagcctggctcgacaatttcgcgcggtgctgggacaacctggtccaaaaactggagaagtccaccgcccaaatcagccaggcggtcactactacccagccgagcctcacgcagaccactgtgatggaaaccgtgactactgtgaccaccagggagcaaatcctcgtaaagcacgctcaagaagagctgccgcctccgccaccgcagaagaaacggcaaatcaccgtcgacactctggagcgcttgcaggagctgcaagaggctacggacgagctggatctgaagctccgccaagccgaagtgatcaaaggctcatggcagccagtcggagatctccttattgacagcctgcaggatcacctggagaaggtgaaggccctcaggggcgagatcgccccactcaaggaaaacgtcagccatgtgaacgatctcgcacggcagcttaccacccttggcatacagctgagcccgtacaacttgtcgactctggaggacttgaacactcggtggaagttgcttcaagtggctgtcgaagatcgcgtcagacagctgcatgaagcacatagagacttcggaccagcatcacaacactttctctccacttccgttcaaggcccctgggaacgagccatcagcccgaacaaagtgccatactacatcaatcacgaaacccagacgacgtgctgggaccaccccaagatgaccgagctctaccaaagcctggcagatttgaataatgtgcgcttttctgcgtacagaaccgctatgaaactccgccggcttcagaaggccctgtgcctggaccttctcagcctctccgcagcctgtgacgctctggatcagcataacctgaaacagaacgaccagccgatggacatcctgcagatcatcaattgtctgactaccatctatgaccggttggagcaggaacataacaacctggtcaacgtcccgctgtgtgtcgatatgtgtctgaactggctcctgaacgtgtacgacacgggtcggaccggtaggatccgcgtgctgtccttcaagactgggatcatctcactgtgtaaggcgcatctggaggacaaatacagatatctctttaagcaagtcgcctcgtccaccggattctgcgaccagcggcgactgggtttgctgctgcatgacagtatacagatcccaagacaactcggtgaagtggcttccttcggcggtagcaatattgagccgagcgtgcggtcctgttttcaatttgccaacaacaagcctgaaatcgaagcggctctcttccttgactggatgcggctggaaccgcaatcaatggtgtggcttccagtgctgcaccgcgtggccgcagcggagacggctaaacaccaggccaagtgcaacatctgcaaagagtgcccaattatcggatttcgataccggtcactcaagcatttcaactacgacatttgccagtcctgcttcttctctggaagggtcgcgaaggggcacaaaatgcactacccgatggtcgaatactgcaccccaactacttcgggagaggacgtgagggacttcgcaaaggtcctcaagaacaagttccgtacgaagcggtacttcgcgaagcatcctagaatgggctacttgccggtgcaaactgtgctggaaggagacaacatggaaactgacaccatg

SEQ ID NO: 251276 - DNA, 3591 bp, synthetic construct
  misc_feature 1..3591: note = Description of Artificial Sequence: Synthetic coding sequence
  source 1..3591: mol_type = other DNA
atgctgtggtgggaggaggtggaggattgttacgagagggaagatgttcagaagaaaacgtttaccaagtgggtaaacgcgcaattctcaaagttcggcaagcagcatatcgaaaacctcttttccgatctgcaggatggaaggcgtttactcgacctgctcgaaggactgaccggccagaagctgcccaaagagaaaggcagcacaagggttcatgcattgaataacgtgaataaagctctccgtgtactgcagaacaataacgtggatctggtgaatatcggtagcacagatattgttgatggaaaccataaactgaccctcggactgatctggaatattattctgcactggcaggtgaaaaacgttatgaagaatattatggccggcctacagcagacgaatagtgagaagattttgctatcatgggtcagacaatccacaagaaactacccccaggtcaatgtcatcaacttcactacatcttggtcagatggactcgccttgaacgccctcatccacagccacaggcccgatctcttcgattggaatagcgtcgtgtgtcaacagtccgctacccagcgcttggaacatgccttcaatatcgccagataccagctgggcatcgaaaagctcttggatcccgaagacgtcgacacgacatacccagataaaaagtccatcctaatgtacatcacctcgctgttccaagtgctgccccagcaggtatcgatcgaagcgatccaggaagtggagatgttgccccggcctccaaaggtgacgaaggaagagcatttccagcttcaccaccagatgcattactctcaacaaatcactgtgagcctggcccagggatatgagcgcacgtcctccccaaaaccacgcttcaaaagctacgcatacacacaggcagcctacgtcacaacaagcgatccaacccggagcccattcccttcccagcatctggaggcaccagaggacaagtccttcgggtcttctctaatggaatcagaggttaatctggatcgataccaaacggccctggaagaagtactgagttggcttctgagcgcggaggacacgttgcaggcccagggggagatctccaacgatgttgaggtagttaaagatcaatttcatacacacgagggttacatgatggatttgaccgcccatcagggcagggtcgggaacattctgcagttaggatcaaagctcatcgggacaggtaaactgagcgaggatgaggagactgaagtgcaggaacagatgaacctgttgaactcaaggtgggaatgcctgcgcgtggcatcaatggaaaagcaatccaatctgcacagagtgctgatggatcttcagaatcagaagttaaaggagctcaacgactggctcacaaaaaccgaagagaggacccgcaagatggaagaggaacctctgggtcctgacctggaggatctaaagcggcaagtgcagcagcataaggtgttgcaggaggatctggagcaggagcaggtgagagtgaactccctgacacatatggtggtagtcgtggacgagtccagtggggatcacgccaccgccgccctggaagaacagctgaaagtactcggcgacaggtgggctaacatatgtcgctggaccgaggataggtgggtcctgcttcaggatatcttactgaagtggcagcgactcaccgaggaacagtgcttgttttcagcctggttgtctgagaaagaggatgcggtcaataaaatacacacgacaggcttcaaggaccagaacgagatgctctcctccttgcagaaactcgccgtgttgaaggcggacctggagaaaaaaaaacagtcaatgggcaaactttacagtctgaagcaggatctcttgtccacgctgaaaaacaagtctgtcacccagaagacggaggcctggctggataactttgccagatgctgggataacctggtgcaaaagctggaaaagtccacggcccagataagtcaggccgtcaccaccactcagccctcacttacacagactacggttatggagacagttactaccgttaccactagggagcagattctggtgaagcacgcccaggaagaacttccaccacccccgccgcagaaaaaacgccagatcactgtggatacactcgaaagactccaggaactccaggaggccaccgacgagctggatctgaagctgcgacaggctgaggtaatcaaaggctcatggcagcccgtcggagacctcctaatcgactccctgcaggatcatctcgaaaaggtgaaggcgctgcggggagagatcgcgccgcttaaagagaacgttagccacgtcaatgacctagcccggcaattgaccactctaggaattcagctttccccgtacaatctgtcgaccctcgaggatctgaatacccgctggaaactgctgcaggtcgcggtggaagatagagttagacagctccatgaggctcatcgagacttcggcccagcctcccaacacttcctctccaccagcgtccaagggccgtgggagcgggccatctctcccaacaaggtgccctattacattaaccacgagactcaaactacctgctgggaccaccccaaaatgaccgaactttatcagagtctcgcggatctgaataacgtgcgattctcggcctacagaaccgccatgaagctccggaggctgcaaaaggcgctgtgccttgatctgctgtcactgagcgccgcttgcgacgctcttgatcaacacaacctcaagcaaaacgatcagccgatggacattctccagattatcaattgcctgacaaccatttacgaccgattagagcaggagcataacaatctggtcaacgtgcctctgtgtgtcgacatgtgcctgaactggttgctcaacgtctatgacactgggaggaccggccgtatccgtgtgctgagctttaagaccgggatcatcagcctgtgtaaggcccacttagaggacaagtatcgttacctctttaaacaggtggcatcttcaacagggttttgtgatcagcgcaggctgggtctgctgctgcatgactccatccaaatcccgaggcagctgggcgaggtggccagtttcggcggctctaatatcgagccatccgtccgaagctgcttccagttcgccaataataagcccgagattgaggcagccctgttccttgactggatgcggctggaaccgcagtcgatggtatggctccccgtcttacatagggtggcagccgctgagaccgctaagcatcaagcaaagtgcaacatttgcaaagagtgtccaattatcggattcagatatcgcagcttgaagcattttaactacgacatatgccagtcttgttttttttccggccgtgtggccaagggccataaaatgcactaccctatggtggagtattgcaccccaaccacgagtggggaggatgtcagggacttcgcaaaggtgctcaaaaataagttcaggaccaagcgctattttgctaagcaccctcgaatgggctatttgccggtacagaccgtcctggagggtgataatatggagaccgatacgatg

SEQ ID NO: 251277 - DNA, 3591 bp, synthetic construct
  misc_feature 1..3591: note = Description of Artificial Sequence: Synthetic coding sequence
  source 1..3591: mol_type = other DNA
atgctgtggtgggaggaggtcgaggactgttacgagcgagaggatgtgcaaaaaaagaccttcaccaaatgggtcaacgcacaatttagcaagttcggaaaacagcatattgagaatctgttctcagatctccaggatgggagacgactgctggatttgctggaggggctgacaggccagaaactcccaaaagagaagggctccactcgagtgcacgctctgaacaatgtgaataaggcgttgcgcgttctccagaataacaacgttgacttggtgaatatcggatccacagacatcgtggacgggaatcacaagctgaccttaggcctgatttggaatataatactgcactggcaggtcaaaaacgtgatgaaaaacataatggcaggcctgcagcagacaaactcagagaaaatcttattgtcatgggtcagacagtccactcgtaactatccccaagttaatgtgattaactttaccacaagttggtctgacgggctggccttgaacgccctcatccatagccaccgccccgacctgtttgattggaatagtgttgtctgtcagcaatcagccacccaacggctggagcacgctttcaacatcgcccgatatcagctgggtattgaaaaactgctggacccagaggacgtagacacaacatatcccgacaaaaaaagtatcctaatgtacatcactagcttgttccaggtcctcccacagcaggtcagcatcgaggccattcaagaagttgagatgctcccacgcccgccaaaagtaacaaaggaggaacactttcagttacaccaccagatgcactatagtcaacagattacagtgagcctcgcacaaggttatgaaagaaccagctctcctaagcctaggtttaagagctacgcctacactcaggccgcatatgtgacaacctcagatcctacaaggagccctttccccagccagcacctggaagcaccagaggacaagtcctttggttcgagcctcatggagagtgaggtgaatctggatcgctatcagacagctctcgaagaagtcctgtcgtggttgctatctgccgaggacacattacaggcacagggggagatcagcaatgatgtcgaggtagtcaaggatcaattccatactcacgaagggtatatgatggacctcacagcccaccagggccgagtggggaacatcctccagctgggatccaaactaattggtactgggaaactttctgaggatgaagagacagaggtgcaagagcagatgaaccttctaaacagcaggtgggaatgcctgcgcgtggcctctatggaaaaacagtccaatttacaccgcgttttaatggatttgcagaaccaaaaactgaaggagctgaatgattggctgactaagacagaggaacgtacacggaagatggaagaggaacctctgggtcctgacctggaggacctcaagaggcaagtccaacagcacaaggtcctgcaggaagatttagagcaggaacaagtccgggtgaactctctgacacacatggtggtcgttgtcgacgaaagcagcggggatcacgctactgccgcgctagaagaacagcttaaagtgctgggagaccgatgggctaacatttgcagatggaccgaggaccgctgggttctgctacaggatatcctcctgaagtggcagaggcttactgaggaacaatgcctgttctctgcctggctcagtgaaaaggaggatgccgtcaacaaaatccataccaccggttttaaagaccagaatgagatgctcagcagtctgcaaaaactagctgttcttaaggccgacttagaaaaaaaaaaacagagtatggggaaattatactcactcaagcaggacctgctttccaccctgaagaataaaagcgttactcagaaaacagaggcttggctcgacaattttgcccgttgttgggacaatctggttcagaaactggagaagagcacagcccaaattagtcaggccgttactaccactcagccgagtctaacccagacgactgtgatggagaccgtaactaccgtaaccacacgcgaacaaattcttgtcaaacatgctcaggaggagctaccaccaccaccaccacagaaaaagcgtcagataaccgttgacaccctggaacgactgcaggagctgcaggaggcaaccgatgagctcgatctgaagttgagacaggcggaagtgattaagggatcttggcagcctgtaggggacctgttaatcgactctctgcaggaccacctggaaaaagtgaaggctctccgaggcgagatcgctcctctcaaggagaatgtgtcccatgtaaacgacttagctcggcagcttacaaccctaggcattcagctgagcccatataatctgtcaaccctggaggatctcaacacaaggtggaaactcctgcaagtcgccgtggaagatagggtgaggcagctccacgaagcccacagagatttcggaccagcgtctcagcacttcctgtccacttcagtgcagggtccgtgggagcgggcgatttcgcctaacaaagttccatattacataaaccatgagacccagaccacctgttgggatcatccgaagatgactgagctataccagtcattggctgatctcaacaatgtgcggttctccgcgtatcgtacggccatgaaactgcggcggctgcagaaggcgctgtgtctggatctcctgtcactatccgctgcctgtgacgcactcgatcagcataatctaaaacagaatgaccaaccaatggatattttacaaattattaactgtttgacaacaatctatgatagattagaacaggagcataacaatcttgtgaacgttcctttgtgcgtggacatgtgtctgaactggttgctgaacgtgtacgacaccggacgaacaggcagaattcgggtccttagctttaagactggaataatatctctgtgtaaagcccacctggaggacaagtaccggtacctgtttaaacaggtggccagctccacaggattctgtgaccagaggagactaggccttctgctgcacgactctatccagatcccacgccagttaggcgaggtcgcttccttcggcgggtcaaacattgagcctagcgtgcgctcttgttttcaattcgcgaataacaagccagagattgaggctgccctgttcctggattggatgaggttagaaccgcagtccatggtctggttacctgtgttgcacagagtcgccgcggcagagaccgctaagcatcaggcgaaatgcaacatttgcaaagagtgtccaatcatcggattcagataccgcagtttgaaacattttaattacgacatttgtcagagttgttttttcagcgggcgggttgcaaagggccataaaatgcactacccgatggtggagtattgcaccccaaccacctctggagaggacgtgcgcgactttgcgaaagtgctaaaaaacaaattccgcaccaagagatactttgccaaacaccctagaatgggttatctcccggttcagaccgtgttggaaggggataacatggaaaccgatacaatg

SEQ ID NO: 251278 - DNA, 3591 bp, synthetic construct
  misc_feature 1..3591: note = Description of Artificial Sequence: Synthetic coding sequence
  source 1..3591: mol_type = other DNA
atgctctggtgggaggaggtcgaggattgctatgagcgggaagatgtgcagaaaaagactttcaccaaatgggttaacgctcaattctccaaatttggcaagcagcatatagaaaatcttttctccgacctccaggatggccggcgcctacttgatctcctcgaaggccttactggtcagaagctcccaaaagaaaaagggtcaacgcgggttcatgctctcaataacgtaaacaaagctctacgcgtgttacagaacaacaacgtagatctggtgaatattggctcaacagatattgtggatggaaatcacaaacttacgttgggccttatctggaatattatactgcactggcaggtaaaaaacgtgatgaagaatattatggccggcctgcagcaaacgaactccgagaaaatcttgctgtcctgggtccgacagagtaccaggaattacccacaggttaatgtaatcaacttcacaacctcctggagcgatggccttgctttaaatgcactaattcattcacacagaccagatctgtttgactggaatagcgtggtgtgtcagcagagtgcaacgcagagactggaacatgcctttaatattgctagatatcagttgggcatcgagaaactgctggaccccgaagacgtggatactacatacccggataagaaatccattcttatgtacatcaccagtctgttccaggtgctcccccagcaagtgtctattgaggcaatccaagaagttgagatgctgccccgcccccctaaggtgactaaggaagaacattttcagctccaccaccagatgcactactcccaacagattacagtgtcgttagcccaagggtacgagcgcacctcgtcaccaaagccacgattcaagtcttatgcgtatacacaggctgcatacgtcaccacaagtgaccctacaaggagcccttttccttcacaacacttggaagcaccagaagataagtccttcggtagctcacttatggagtcagaggtgaacttagatagataccagactgctcttgaggaagtgctcagctggctgttatcagctgaagatacactacaggctcagggtgagattagcaacgacgtcgaagtggtaaaggatcaattccatacccacgaaggatacatgatggatctcactgcccaccaagggcgagtgggaaatatcctccaattaggttccaagctgataggcaccgggaaactcagcgaagatgaggaaactgaggtgcaggaacaaatgaatcttctcaactctcgatgggaatgcctgagggtggccagcatggagaaacagtcaaatctccaccgggtgctcatggacttgcaaaaccagaagttgaaagagctgaacgattggttgaccaagacagaagaaagaacaaggaaaatggaagaagagccgctcggcccggacctcgaagatttgaagcgccaggtacagcagcacaaggttctccaggaggacttagaacaggaacaggttcgagtgaatagtctcacccatatggtggtggtcgtggatgagtcctctggcgatcatgccaccgcagctcttgaggagcagttaaaggtgctcggcgaccgctgggcaaacatttgccgctggactgaagacagatgggtcctgctgcaggacatcctgttaaagtggcaacggctgacagaagagcaatgtctgttcagcgcctggctgagtgaaaaggaagatgcagttaacaagatccacaccaccggctttaaagatcagaacgagatgctgagtagtctacagaaactcgccgtgctcaaggctgatcttgaaaagaagaagcagagtatgggcaagctgtatagtctaaaacaggacttgctgagtactcttaaaaacaagagcgtcactcagaaaacagaggcctggctggacaatttcgctagatgctgggacaacctggttcagaagcttgagaaaagtaccgctcagatctcacaggcagttacaaccacgcagccaagccttacccaaacgacggtgatggaaaccgtgactaccgtcactacaagagagcaaattctggtcaaacacgcccaagaggagttgcctccgccaccccctcagaagaagaggcaaataacagtggatacactcgagcgactgcaggaactgcaggaagccactgatgagctcgatttgaagttgcggcaggctgaggtcattaaagggtcctggcagccagtgggggaccttttaattgattccctgcaagatcatctggagaaagtcaaagctttgaggggagagatcgcccccctgaaagagaacgtttcgcacgtgaacgacctggccagacagctcacaaccctcggcatacaactctctccatacaacctctcgacactggaggacctcaatacacgctggaagttgcttcaggtagccgtggaagatcgcgtgcggcagctccacgaagcccacagggactttggcccagcaagccagcatttcctgagcacgagcgttcaggggccatgggagcgggcaatttcaccaaacaaggttccttattatattaatcatgaaactcagaccacgtgttgggatcatcccaaaatgacagagctatatcagtccctggcggatctgaacaacgtgcggtttagtgcctatcgtaccgcaatgaaattgaggcgtcttcagaaggccttgtgcctggatctcctgtctctaagtgcggcctgcgatgcacttgaccagcacaatttgaaacagaacgaccagcccatggatatcctgcagatcataaactgcttgaccacaatttacgatagactcgagcaggaacataacaatctggtgaacgtgcccttatgcgttgacatgtgtttgaactggctcttgaacgtgtacgacacaggccgtactggaaggatccgggtcctcagtttcaagaccgggatcatctctctgtgcaaggctcatctggaagataagtatcggtatctgtttaaacaagttgcttcttctactggcttctgtgaccagcgcaggctcggactgttactgcacgacagcattcaaatccctcgccagcttggcgaggtggcaagcttcggtggctctaatattgagcccagcgttcgatcatgttttcagtttgcaaataataaaccagaaattgaggcagcactgttcctcgattggatgagattagaacctcaaagtatggtttggctcccagtgttgcacagagtcgctgctgcggagactgcgaagcatcaagctaagtgcaacatatgtaaggagtgccccatcatcggattcagataccgctcgcttaaacatttcaactatgatatctgtcagtcatgctttttctccggccgtgtggcgaaagggcacaaaatgcactaccccatggtggaatactgtacaccaacaacaagcggcgaggatgttcgtgattttgccaaggtactgaaaaataaatttcggactaaaagatacttcgctaaacaccctagaatgggatatttgcccgttcagaccgtactcgagggcgacaacatggaaacagataccatg

SEQ ID NO: 251279 - DNA, 3591 bp, synthetic construct
  misc_feature 1..3591: note = Description of Artificial Sequence: Synthetic coding sequence
  source 1..3591: mol_type = other DNA
atgctttggtgggaagaggtcgaagattgctacgaaagagaagatgtccagaaaaagacctttactaagtgggtgaatgcgcaatttagcaagtttggtaaacaacatattgagaatctttttagcgatctgcaagatggaaggagacttctcgatctgcttgaaggattgactggacagaaactgccgaaagaaaagggttcgactcgagttcatgcgcttaacaatgtcaataaggcactgagagtgctgcagaacaataacgtcgatctggtgaatatcggatcaactgatatcgtggatggtaaccataagctgactctgggattgatatggaacattatcttgcactggcaagtgaagaatgtgatgaagaacatcatggcaggactccaacaaaccaacagcgagaagattctgctctcctgggtgcgccaatcaactaggaattatccacaagtcaatgtcataaactttactacgagctggtcagacggactcgctctgaacgcactcattcactctcaccgtccagatcttttcgattggaatagcgtcgtgtgtcagcaatccgccacccagcgccttgaacatgcattcaatatcgcgagataccagcttggaatagaaaagctgctcgacccagaagatgtggacactacctaccctgataagaagtcgatactcatgtacattacctcgctgtttcaagtgcttccacagcaggtcagcatcgaagcaattcaagaagtggagatgcttccaagaccacctaaggtcaccaaagaagagcactttcaacttcatcatcagatgcattacagccaacaaattaccgtctctctggcccaagggtacgagagaactagcagccctaagcctcggttcaagagctacgcttatacccaagcagcatacgtgaccacctccgacccaactcgatcgccatttccttcgcagcatcttgaagccccagaggataaatcattcggatcctcgcttatggaatcagaggtgaaccttgacagataccaaaccgcacttgaggaggttctttcatggcttttgtcggccgaggatactcttcaagcgcaaggagaaatttcaaacgacgtcgaagtggtgaaggatcagtttcatacccatgagggttatatgatggacctcaccgcacaccagggtcgggtgggaaacatactgcaactgggttcgaagctgattggtaccggaaaactctcggaggatgaagaaaccgaggtccaggaacagatgaacctgctcaactcgcggtgggagtgtctgagagtggcgtcaatggagaagcagtcgaatcttcaccgcgttctgatggatctgcaaaatcagaagctgaaggaacttaacgactggcttactaaaaccgaagaaagaaccaggaagatggaagaagaaccactcggtccggatcttgaagatctcaaacggcaagtgcagcaacataaggtcctccaagaggatttggaacaggaacaggtgagagtcaatagcctgacccacatggttgtggttgtggatgagtcatccggagatcacgctaccgccgcactggaagaacaactcaaggtgctgggtgaccggtgggccaacatctgccgatggaccgaggacagatgggtgctgcttcaagacatcctgcttaagtggcaaagactgaccgaagaacaatgtcttttttccgcatggctttcagagaaggaggatgcggtgaacaagattcatactaccggttttaaggatcagaacgagatgctctcctcccttcaaaagttggcagtgctgaaggcagatctggaaaagaaaaagcaaagcatgggcaagctgtactctcttaagcaagacctcctgtccactctgaagaacaaatccgtgacccagaaaaccgaggcatggctggacaacttcgcacggtgctgggacaatctggtccaaaaactcgaaaagtcgaccgcacagatcagccaagccgttacgaccactcaaccttcccttactcaaaccaccgtgatggagactgtcaccactgtgactactcgggaacagatactggtgaagcatgcacaggaagagctcccgcccccgccacctcaaaagaagaggcagattacggtcgatactcttgaaaggctccaggagcttcaagaagcaactgacgaactcgacctgaagctgcgccaagctgaggtcatcaaaggttcgtggcaacctgttggggatcttctcatcgactcccttcaagatcacctcgagaaggtcaaggctctgaggggagagatcgcaccactcaaagaaaatgtgtcgcacgtgaacgacctggcaagacaacttactacgctcggcattcagctgtccccttacaatctctcaactctggaagatttgaacactcgttggaagttgcttcaggtggcggtggaagatagagtgcgacagcttcacgaagcacatagagacttcggccccgcatcgcaacatttcctttcgacttcagtgcaggggccttgggagagagcaatctcgccgaacaaagtgccctactacattaatcacgaaactcagaccacttgttgggatcatccaaagatgaccgagctttaccaatcgctcgccgatctcaataacgttagattctcggcatacagaactgcgatgaaactccgtaggcttcaaaaggctctctgtctggacctgttgtccctgtcagcggcgtgtgacgcactggaccagcataacctcaaacaaaacgatcagcctatggatatactccagatcataaactgcctgactactatttacgataggttggaacaagaacacaataacctggtcaacgtcccgctctgtgtcgatatgtgccttaactggctcctcaatgtctacgataccgggcgcaccggccggatcagggtgcttagctttaagaccggaataatctccctgtgcaaggcacaccttgaagataagtaccgatacctgtttaagcaggtggcaagctcaacgggtttctgtgatcagcggaggctggggcttttgctgcacgactctattcaaattcctcgtcagctgggagaggtcgcctcctttgggggttccaacatcgaaccttcggtgcgcagctgcttccaatttgccaacaacaaaccagaaatcgaggccgccctctttctcgactggatgagactggagcctcagtctatggtgtggcttcctgtgcttcatcgggtcgccgctgcagaaaccgcaaagcatcaggcaaagtgtaacatctgtaaagaatgccctattatcggattcaggtaccggagccttaaacatttcaactacgatatctgtcagagctgttttttcagcgggagggtggccaagggccataagatgcattaccctatggtggaatactgtactcctaccacttccggagaagatgtcagagattttgcaaaggtgctgaagaacaagtttaggactaaacgatacttcgctaagcacccgcgaatgggctacctgcctgtgcaaactgtgctcgaaggggataacatggagactgatacgatg

SEQ ID NO: 251280 - DNA, 3591 bp, synthetic construct
  misc_feature 1..3591: note = Description of Artificial Sequence: Synthetic coding sequence
  source 1..3591: mol_type = other DNA
atgctctggtgggaagaagtggaagattgttacgagcgagaagatgtgcagaaaaagacctttacgaagtgggtgaatgcgcaattttcaaagtttggtaagcaacatatagagaatctgttctccgatttgcaagacggccggcggttgctggaccttcttgaaggacttactggccagaaacttccaaaggaaaaaggatccaccagggtgcatgcacttaacaacgtcaacaaggcgcttcgagtcttgcagaataacaacgtcgacctcgtgaacattggatccacggatattgtggatgggaaccataaacttacgcttggacttatctggaacattattctgcattggcaagtcaagaacgtgatgaagaacatcatggcagggttgcagcaaaccaattcggagaagattctgctttcctgggtccgtcagtccaccagaaactacccacaagtcaatgtgattaacttcaccacgagctggtcggacgggcttgcacttaatgcacttatacattcccatcggccggatctgtttgactggaatagcgtggtctgccagcaatcagccactcagagattggaacacgcctttaacatcgcaagataccagcttggcattgaaaagttgctcgaccctgaggatgtggacactacttacccagataagaagtcgatcctcatgtacattacctccctgtttcaagtgcttccccaacaagtgtccattgaggcgatccaagaagtggagatgctgccacggcccccaaaggtgactaaagaagaacatttccaactgcaccaccagatgcactactcacagcagattacggtgagccttgcacaggggtacgaaagaacctcatcacccaagccgcgatttaagtcctacgcttacacccaggcagcatatgtgactacgtcggatcccaccaggtcgccattcccttcacaacatctcgaagcacctgaagataaatcctttggctccagccttatggaatccgaagtcaaccttgataggtaccaaaccgcccttgaagaagtgttgagctggctcctttcggcagaagatacccttcaagcccaaggtgagatttcaaatgatgtggaggtggtgaaggaccagtttcatacccacgaaggttacatgatggacctgaccgcacaccagggaagggtgggaaatatccttcaactgggttcgaagctcatcggaacggggaagctctccgaagatgaagaaacggaagtgcaagaacagatgaaccttcttaatagcaggtgggagtgcctgcgcgtggcatcgatggaaaagcaatcaaacctccatagggtgttgatggatctgcagaatcagaagctcaaggagctcaacgattggcttaccaagaccgaagagcgcacccgtaagatggaagaagaacctctcggaccagacctggaagatctgaagaggcaggttcagcagcataaggtcctgcaggaagatctcgaacaggaacaagtgcgtgtgaattctctcacccacatggtggtggtcgttgatgagtcgtcgggagatcacgccactgcagcactggaagaacagctgaaggtgcttggagatcgctgggcaaacatttgtaggtggaccgaggataggtgggttttgcttcaagatattctgctcaagtggcagagacttactgaagagcagtgtcttttctccgcctggctgtctgagaaggaggatgccgtgaacaagattcatactaccggcttcaaggatcaaaacgaaatgctctcgtcccttcaaaagctggcagtcttgaaggcggacctggagaaaaagaagcaatcaatgggaaagctgtactcgcttaaacaagatcttctctccaccttgaagaacaagtccgtcacccaaaagactgaagcatggctcgacaactttgcgagatgctgggataacctggtgcagaaacttgaaaagtcgactgcccaaataagccaagcagtgaccactactcagccatccctgacccaaaccactgtgatggagacggtaaccaccgtgaccactagagaacaaattcttgtgaagcatgcccaagaggaactgccacctcctccacctcagaagaagcgccaaatcaccgttgataccctggagagactgcaggagctgcaggaagcgactgatgaactggatctgaagctcagacaggcagaggtgataaaaggctcgtggcagcctgtgggcgatctcctgattgattcgcttcaggaccatctcgaaaaagtgaaagcgctgcgaggtgaaatagcaccactgaaagaaaacgtgtcccatgtcaatgatctcgcacgccaacttaccaccctgggaattcaactctccccatacaacctttcgaccctggaggatctgaataccagatggaagctgctgcaggtggccgtggaagatcgagtgcgccaacttcatgaagcacaccgtgattttggacctgcatctcaacactttctcagcacttcggtgcaggggccttgggaacgggccattagccccaacaaagtcccttactacattaaccatgaaactcaaaccacctgttgggatcatcctaagatgactgaactttaccaatcactcgctgatctgaataacgtccggttttccgcgtacagaactgctatgaaactgagacgcctgcagaaggccctctgtctggacctcctgagcctcagtgcagcatgcgatgcgctggatcaacataacctcaagcagaacgatcaaccaatggacattcttcagatcattaactgtctcaccactatctacgaccggttggagcaggagcataacaatctggtgaatgtgcctttgtgtgtggacatgtgtctcaattggctgcttaacgtctacgatactggtcgcaccggacgtatccgcgtgctgagcttcaagacgggcatcatttccctttgcaaggcacatcttgaagataagtaccgctacctgtttaagcaagtcgcaagctctactggattctgcgatcaacggagactggggctgcttctgcatgactcaatccaaatccctagacaactgggagaggtagcatccttcggaggaagcaacatcgaacccagtgtccgttcctgtttccagtttgcaaacaataagcctgagattgaagccgccttgttccttgattggatgagactggaaccacagtccatggtgtggctgcctgtgctgcaccgggtggcagcagcggaaacggcaaagcatcaagccaagtgtaacatttgtaaagagtgtccgattatcggttttcgttacagatccctcaaacactttaactacgatatttgtcagtcatgttttttctccggacgagtcgcaaaaggacataagatgcactaccccatggtggaatactgcactccaaccacttcaggggaagatgtgagggatttcgcaaaggttctcaaaaacaagttccgcaccaagcgttacttcgccaagcatcccagaatgggatacctgccagtgcaaactgtacttgagggtgataacatggaaaccgatacgatg

SEQ ID NO: 251281 - DNA, 3591 bp, synthetic construct
  misc_feature 1..3591: note = Description of Artificial Sequence: Synthetic coding sequence
  source 1..3591: mol_type = other DNA
atgctgtggtgggaggaagtggaggattgctacgagagggaagacgtccagaaaaagacattcactaagtgggtcaatgctcagttctcaaagttcggaaaacagcatatcgagaatcttttttcagatctacaggacggccgccgattgcttgacctgctggaggggctaactggccaaaaattgcctaaagagaaagggtccacacgcgtgcacgccttgaacaacgtcaacaaagccctccgagtgctgcagaataataatgtggatctggtgaacatcgggagcacggatatcgtcgatgggaatcacaagctgacattgggcttgatctggaacatcatcttgcattggcaagttaaaaatgtgatgaagaacatcatggcgggcctgcagcagaccaattcagagaagatcctcttgagttgggtgcgccaatctaccagaaattacccccaagtgaacgttattaacttcaccaccagctggagcgacggactcgccctgaacgccttgatacactctcacagacccgacctctttgattggaatagtgtggtgtgtcaacagtctgccacgcagcggttggaacatgcctttaacattgctaggtatcagttagggatcgagaagctgctggatcccgaggacgtcgacaccacttatccagataaaaagagcatactgatgtacatcacttccctgtttcaagtgctcccccagcaggtatcgatcgaagctatccaagaggtggagatgctcccccgcccaccaaaggtgacaaaggaggagcattttcagttgcatcaccaaatgcattacagccaacaaatcacagtaagcctggcacagggttacgagcgaacaagcagcccgaaacctcgatttaagagctatgcatatacccaggcggcgtacgtaacaacctctgaccccacgagaagtccttttccaagtcagcacctcgaagcacctgaggataaatcgtttggctcatccctgatggaatccgaagtcaacttagatagataccagactgctctcgaggaagtcctgtcgtggctcctttctgctgaagacactttgcaggcgcagggggaaatatctaatgacgtggaggtggtgaaggaccagttccatacccatgagggatacatgatggacctcaccgcacaccagggacgggtcggtaatatacttcagctcgggtctaaactgattgggaccggtaagctttctgaagatgaagaaacagaagtgcaggagcagatgaatctcctcaattctcgatgggaatgtctaagagtggcttctatggagaagcagagcaacttacatcgagtgctcatggatctgcagaatcaaaagctgaaggagttgaatgactggctcaccaagaccgaggaacggaccaggaagatggaagaggagcccctgggtcccgatctcgaggacttaaaacggcaggtacaacagcataaggtcctgcaggaagacttagagcaggaacaggtcagagtaaatagcttaactcacatggtggtggtagtggacgaaagctctggcgaccacgccactgccgccctcgaagaacagcttaaggtgttgggagaccggtgggcaaacatatgccggtggactgaggaccgttgggtactactacaggacattctgctgaaatggcagagactcaccgaggagcagtgccttttctctgcttggttgtccgagaaggaagatgctgtgaataagatccacacgacgggattcaaggatcaaaatgaaatgctcagctctctgcagaaactggctgttctaaaagctgatctggaaaagaagaaacaatctatgggaaagctgtacagcctgaagcaggaccttctcagtactctcaagaataaatctgtgacccaaaagaccgaagcttggctggacaacttcgcccggtgttgggacaacctggtgcagaaactcgagaaatcgacagcccaaattagtcaggctgttacaacgacacagccatcattgacccagacgaccgtcatggaaacagtgaccaccgtgaccacacgcgagcagattctcgtgaagcatgctcaagaagaactgccccccccccccccacagaaaaaacgccagatcacagtagacaccctggagcggctgcaagaactccaggaggccactgacgaacttgatctgaaactaaggcaagctgaggtgattaagggtagctggcaaccggtgggagatctcctgatagactcccttcaagatcacctagaaaaggttaaagctctccgcggtgaaatcgcacctcttaaagagaacgtgtctcatgtcaatgatctggccagacagctgaccaccctaggtatccagctgtcaccatataatttaagcactctcgaggacctcaacacccggtggaaattactgcaggttgccgtggaggaccgagtgcggcaactgcacgaagcccatcgggatttcggtccggctagtcagcacttccttagtacgagcgtgcagggtccctgggaacgcgcaatatccccgaataaggtcccgtattatattaatcacgagactcagaccacatgttgggaccacccaaaaatgacagagctgtaccagtccctggctgacctcaacaacgtgaggttttcagcctaccgaaccgcgatgaaactacgtaggctgcagaaggcactttgcctagatctgctgtccctctccgccgcatgcgacgctctggaccagcataaccttaagcagaacgaccagcccatggatattctgcagatcattaactgcctgaccaccatctacgacaggctggaacaggagcacaacaaccttgtcaacgtacctctatgcgtagacatgtgtctaaattggctgttgaacgtttacgatacgggcaggaccggtcggatcagggtgctgtcatttaagactggaattattagtctgtgcaaagcgcatctggaagataagtacaggtacctttttaagcaggtggcttcttctacgggcttttgcgaccagagacggctaggtctcttactgcacgacagtattcagatccctcgccagctgggcgaagtggcatcgttcgggggatcaaatatcgaacctagcgtccgcagctgctttcagtttgcaaacaacaagcccgagatcgaagctgcactttttctggactggatgcggctcgagccccagagtatggtgtggcttcccgtgctacatagagtggctgccgcagaaacagctaagcaccaggcaaaatgcaatatatgtaaggagtgtccaataatcggcttccgatatagaagcctgaaacactttaattacgatatttgtcagagctgttttttcagtgggcgagttgctaaggggcacaagatgcactatcctatggttgaatactgtacaccgacgacgagtggcgaagacgtgcgggactttgccaaagttctcaaaaacaaatttaggacaaagcgatatttcgctaagcatccccgtatgggatatctgccagttcagaccgtgctcgagggtgacaacatggaaaccgacacaatg

SEQ ID NO: 251282 - DNA, 3591 bp, synthetic construct
  misc_feature 1..3591: note = Description of Artificial Sequence: Synthetic coding sequence
  source 1..3591: mol_type = other DNA
atgctgtggtgggaagaagtcgaggactgctatgagcgcgaagatgtgcagaagaaaaccttcaccaagtgggtgaatgcgcagttttccaagttcggtaagcagcatattgaaaacctgttctctgaccttcaggacgggagaaggctgctggacctgctggaaggactgaccggccaaaagctgcccaaggagaagggaagcacgagagtccacgccctcaataacgtcaataaagctctgcgggtgctccaaaacaataacgtcgatctggtcaacatcggatccacggacatcgtcgacggcaatcacaagctgaccctcgggctcatttggaacatcatcctgcattggcaggtgaagaacgtgatgaagaacatcatggccggactgcaacaaacgaattccgaaaagatattgctgtcgtgggtccggcagtccactcgcaactacccgcaagtgaacgtcatcaatttcaccacgtcgtggtcggatggcctcgcgctgaacgctctcatccactcacaccggccggacctcttcgactggaattcggtcgtctgtcaacaatcggccactcaacgcctggagcacgccttcaatatcgcaagataccaattgggtatcgagaaactccttgaccctgaagatgtcgacaccacctacccggacaagaaaagcatcctcatgtatatcactagccttttccaagtcctgccgcagcaggtttccattgaagccatccaagaggtcgaaatgctgccgcgcccgcccaaagtgaccaaagaagagcacttccagctgcaccaccaaatgcattactcccaacagatcactgtctcccttgcgcagggctacgagcgcacctccagccctaagccgcggttcaaatcgtacgcctacacccaggccgcctacgtgaccacctcggaccccacgcggtcgccgttcccatcccagcacctggaggcgcccgaggacaagtcatttggatcatcccttatggagtcagaagtcaatctggaccggtaccaaactgcgctcgaagaggtgctgtcgtggctgttgtccgccgaagataccctccaagcccagggagaaatctccaatgatgtggaggtggtgaaggatcagttccacacccacgagggctacatgatggacctgactgcgcatcaggggagggtgggaaatatccttcagctcggcagcaagctcatcggcactggaaaactgagcgaggacgaagaaactgaagtccaggaacagatgaatcttcttaattcgcgctgggaatgtctgcgcgtcgcatccatggaaaagcaaagtaatctgcaccgcgtcctgatggatctccagaatcagaaactgaaggaactgaatgactggctcactaaaaccgaggagcgcaccagaaaaatggaagaagaaccactcggaccggacctcgaggaccttaaacggcaagtccagcagcataaagtgctccaagaggatcttgagcaggaacaggtgcgcgtgaactcccttacccatatggttgtcgtggtcgacgagagctccggagatcacgcaactgccgccctggaagagcagctcaaagtgttgggcgaccgctgggcgaacatttgccgctggactgaagatcggtgggtcctgctgcaagatatcctcttgaaatggcagcgcttgactgaagaacagtgcttgttttctgcatggctttcagagaaggaagatgcagtcaacaaaatccacactaccggattcaaagatcagaacgagatgctgtcctcgttgcaaaaactggctgtcctgaaagctgatctggagaagaagaagcagagcatggggaagctgtactcactgaagcaggaccttctttcgaccctcaagaacaaatccgtgacccagaaaaccgaagcatggctggacaactttgccagatgctgggataatctggtgcagaagctcgagaagagcaccgcgcagatctcgcaggcagtcaccactacccagccttccctgactcaaacgacggtgatggaaactgtgactaccgtcaccactcgcgagcagatcctggtgaaacacgcccaggaagaactgccccctcctcctccacagaagaagaggcagattactgtggacaccctggaacggttgcaagaactccaagaggctactgacgaactggatctgaagctcagacaagcggaagtgatcaagggatcgtggcaaccggtgggagatctgctgatcgattccctgcaggaccatcttgagaaggtgaaagcgttgaggggcgagatcgctcccttgaaggagaacgtgtcccacgtcaacgatctggctcgccagctgactacgcttggaatccagctgtcgccgtacaacctgtccacgttggaggatctcaacactcgttggaagctgctccaagtggcagtggaagatagagtgagacagctccatgaagcccacagggacttcggcccagcttcgcaacacttcctgtcgacctcggtccaaggaccatgggagcgcgcgatctcacctaacaaggtgccctactacattaatcacgaaactcaaactacttgctgggaccatccgaaaatgactgaattgtaccagtctctggcggacctgaataacgtccggttctcggcataccggactgcaatgaagctgcgccgcctgcagaaagcactgtgcctggacctcctgagcctgtcggcggcgtgcgatgcccttgatcaacacaacctcaagcagaatgaccagccaatggacatcctgcagatcatcaactgcctgaccactatctacgaccgcttggagcaggaacacaataatctggtgaatgtgccactctgcgtggacatgtgtctcaattggctcttgaatgtgtatgatacggggcgcactggccggatcagagtgctgtcattcaagaccggaatcatcagcctgtgcaaagcgcacctggaggataagtatcgctacctgttcaagcaggttgcttcgtcaaccggcttttgcgaccagaggcgcctggggctgctgctccacgactcgatccagatccctcggcaactcggggaggtggcttcgttcggaggtagcaacatcgagccatcggtgcgctcatgtttccaatttgctaacaataagcccgagattgaagccgccttgttcttggactggatgcggctggaaccccagtccatggtgtggctcccggtgctgcatcgtgtggccgctgccgagactgcaaagcaccaggccaaatgcaacatctgcaaggagtgtccgataatcggcttcaggtacaggagcctgaagcacttcaactacgacatttgccagtcctgtttcttttccggtcgcgtcgcgaaaggacataagatgcattaccccatggtggaatactgtactccgaccacctcgggcgaggacgtgagggatttcgcaaaggtcctgaagaacaaattccgtaccaagcgctacttcgctaaacatccacggatgggctacctgccggttcagaccgtcctggaaggagataacatggaaaccgacactatg

SEQ ID NO: 251283 - DNA, 3591 bp, synthetic construct
  misc_feature 1..3591: note = Description of Artificial Sequence: Synthetic coding sequence
  source 1..3591: mol_type = other DNA
atgctctggtgggaggaagttgaggactgctacgaacgtgaagatgttcagaagaaaacgttcacaaagtgggtcaatgcccagtttagtaaatttggaaaacagcacatcgaaaatttgttctcggaccttcaggatggtcgacgtcttcttgatctattggaaggactgaccgggcaaaagcttcccaaggaaaagggttcgacgcgtgtacatgcacttaacaatgttaacaaggcattgagggtcttacaaaacaacaatgtggatctggtaaacataggttctacagacatcgtagacggaaaccataagttgactctcggactcatctggaacattatcctccattggcaagtgaaaaacgtgatgaagaatattatggccggtttgcagcagactaactctgagaagatcctcttgagctgggtcaggcagagtacacggaactacccccaggtcaacgtaattaattttacgacttcatggtccgacggactggctctgaacgccctgatacattcccatcggccggatctattcgattggaactctgtagtctgtcagcagagcgctacgcaaagactggaacatgcgtttaacattgcgcggtaccagctagggatcgaaaagcttcttgatccggaagatgtggatactacttatcccgacaagaagagtattttgatgtacataacctctctgtttcaagtcctacctcagcaggtgtccattgaggcaatccaggaggtcgagatgctacctcgtccgccaaaggttacgaaagaggaacatttccagttgcatcatcaaatgcattactcgcagcagatcacggtctcactagctcagggatacgaacgcaccagcagccctaagccacgctttaagagctatgcgtacacccaagcagcctatgtcactacgagtgatccaactcgttctccattccccagccagcacctggaggcacctgaagataaatcttttggttcttcgttgatggagagcgaagtcaatttggataggtaccagaccgcgctcgaggaagttttgtcatggctcctcagtgctgaggacactctgcaggcccaaggtgagatatctaatgatgtcgaggtagtgaaggaccagttccatactcatgaggggtatatgatggacttgaccgcacaccagggtcgggttgggaatatcctgcagctgggaagcaagctaatcggtacaggtaagctatctgaagatgaggaaacagaagtgcaggagcagatgaacctgcttaactcccgttgggaatgcctacgggttgcatcaatggaaaagcaaagcaatctacatcgagtccttatggatttgcaaaaccaaaaacttaaggaacttaatgattggttgacgaagactgaagagcgtacacggaagatggaggaagagcctctgggaccagatcttgaagatctaaaacgccaggttcagcagcacaaggttttgcaggaggacttggaacaagagcaggttcgcgtcaactccttgacgcatatggttgtcgtcgttgacgagtcttcaggcgaccatgcgaccgcggcgctggaggaacaactaaaggttctgggtgaccgttgggctaatatctgtcgatggaccgaggaccggtgggtcctgctacaggatatcctattgaagtggcagagactgaccgaggagcagtgcctcttttcggcttggttatctgagaaggaagacgctgttaacaagatccacaccacagggttcaaggatcagaatgagatgttaagctcacttcagaaacttgctgtcctaaaggctgacttggaaaagaagaagcagtccatgggaaaactttattccttgaaacaagacttgctctcaacattgaagaacaagtcagttacgcaaaaaaccgaagcctggctcgataacttcgcccggtgctgggataacctagttcaaaaactggaaaagtccacggcacagatttctcaagccgtaacgacgacccagcctagtctaactcagacgacagtgatggaaacagtgacgactgtgaccacccgtgagcagatcctggtgaaacacgcccaggaggagttgccccctccacctccccagaagaagcggcagattaccgttgatacccttgagcgtcttcaggagttacaagaggcaactgacgaactcgacctgaagctccgacaggcagaggtaattaagggctcctggcaacctgttggcgacctcctcatagacagcctccaagatcatcttgagaaggttaaagcactgcggggcgaaattgcgccactgaaggagaatgtcagccacgtcaatgatctcgcgcgccaactcacgactcttgggatccaactctctccttataacctatcaactctggaggacctgaacactcggtggaagcttcttcaggttgctgtggaagacagggtgcgacagcttcacgaggctcaccgagacttcggtccagcgtcccaacactttctttccacgagcgtccagggtccgtgggagcgtgctataagtcccaataaagtgccctactacataaaccatgaaacccagacgacctgttgggatcacccgaaaatgacagagttatatcaatcattggccgatttgaacaatgttcgcttctcggcttatagaaccgcgatgaaacttagacgactccagaaggctctatgtctcgacctattgagtctatccgccgcctgcgacgcgctagaccaacacaacctcaaacaaaacgaccaaccaatggatattctgcagatcatcaactgcctgaccaccatatacgatcggttggagcaagaacataataacctggtgaatgtccccctctgtgtggacatgtgcctaaattggcttctgaatgtctatgacaccggtcgcaccggacgcatccgtgtactctcctttaagacaggtatcatcagtctctgtaaagctcatctggaggacaagtatcgctacctgttcaagcaagtagcatcttcgacaggtttctgtgaccagagacgtttaggacttctcctccatgacagtattcagatcccacgtcagcttggtgaagtggcatctttcggaggctctaatatagagcctagcgtgcgcagttgcttccaatttgccaataataagcctgaaatcgaggccgccctctttctggactggatgagactggagccacaaagtatggtctggcttccggtcctccatcgggtggcggcagcggaaaccgcaaagcatcaagccaagtgtaacatttgcaaggagtgccctattattggcttcagataccggtcgctgaaacatttcaattacgatatatgccaatcctgtttcttcagcgggagggttgctaagggacataagatgcactaccctatggtggaatattgcactcccacgacttcgggtgaggatgttcgcgacttcgccaaggtcttgaagaacaagtttcgcacgaagagatacttcgctaagcatccacgcatggggtatctccctgttcagaccgtcctcgagggagataatatggagacggataccatg

SEQ ID NO: 251284 - DNA, 3591 bp, synthetic construct
  misc_feature 1..3591: note = Description of Artificial Sequence: Synthetic coding sequence
  source 1..3591: mol_type = other DNA
atgctgtggtgggaagaagtggaggattgttacgaaagggaagatgtgcagaaaaagacttttaccaagtgggtcaatgcacagttctccaagttcggaaagcaacacattgaaaatcttttctccgacctccaagatggccgccggcttctggacctgctcgaaggtttgactggtcagaagttgccaaaggaaaaaggatcgaccagagtccatgctcttaacaacgtgaacaaggccttgagggtgctgcaaaacaacaacgtggacctcgtgaatatcggctcgacggatattgtggatggcaaccacaagctgactctgggcctcatctggaacatcatcttgcactggcaggtcaagaacgtgatgaagaacattatggccgggctgcagcagactaacagcgagaagattcttttgtcctgggtgcgtcaatccacgagaaattacccgcaggtcaacgtgattaactttactacgtcttggtccgacggactggcccttaatgcactcatccattcgcacagaccagacctgtttgattggaattccgtcgtgtgtcagcagtcggcgactcagcgtctggagcacgccttcaatattgcccggtaccagttgggaatagaaaagctgctcgacccggaggatgttgataccacctacccagataagaaatcaatcctgatgtatatcacctcgctcttccaagtgcttcctcagcaagtatcaattgaagctattcaagaagtggaaatgctccctagacctccgaaggtcaccaaggaggaacatttccagctgcatcatcaaatgcattactcgcagcaaattactgtgtcgctggcacagggttacgaaagaacgtcgtcgcctaagccccggttcaagtcgtatgcatacactcaagcagcatacgtgaccacctcggatcctactcggtcccctttcccttcccaacatctggaggcaccagaagataagagctttggttcctctttgatggagtcggaggtgaacttggatagataccaaaccgcgctcgaagaggtgctttcctggttgctcagcgccgaagataccctgcaagctcaaggtgaaattagcaatgatgtcgaagtggtgaaggatcaattccacactcacgaaggttacatgatggacctcaccgcacatcaaggaagggttggaaatatcctgcaactcggctccaagctcattggcaccggtaaactttcggaggacgaggaaacggaagtgcaagagcagatgaatctgcttaacagccgatgggagtgtcttagagtcgcgtcgatggaaaaacaatcaaatcttcatcgtgtgcttatggacctgcaaaaccaaaaacttaaggagcttaacgattggctcaccaaaaccgaagaacgaactcgcaagatggaggaagaacctcttggtcctgaccttgaggaccttaagaggcaggtgcagcagcataaagtgctgcaagaagatctcgagcaagagcaggttcgcgtgaatagcctcacgcatatggtcgtggtggtggacgaatcatcgggggaccacgcaaccgctgcacttgaagagcaactgaaggtgcttggagataggtgggccaacatttgtcgctggactgaggatcgatgggtgttgctccaagatattcttctcaagtggcaacgacttactgaagaacagtgcctcttcagcgcctggctgtccgagaaggaagatgccgtgaacaaaattcacactaccggattcaaggaccaaaacgagatgctttcttcgctgcagaaactcgccgtgcttaaagcggatcttgagaagaagaagcagtctatgggaaaactgtattcacttaagcaggatctgttgtctaccttgaaaaacaagtccgttacgcaaaaaactgaagcctggctcgataacttcgcccgttgctgggataacctcgtccaaaagctggaaaagtccacggctcaaattagccaagcagtcaccaccacccagccatcactgacgcaaacgactgtgatggaaactgtgactaccgtcaccacgagggaacagatattggtgaagcatgcccaagaggaacttcctccacctcctccacaaaagaaacggcagattactgtcgataccctggagcggctgcaagaacttcaggaggcaaccgatgaactggatctgaagctccggcaagccgaagtgatcaagggatcgtggcagccagtcggtgaccttctgattgactcccttcaagatcatctggaaaaagtaaaagcactgcgcggggaaatagcaccgcttaaggagaacgtttcccatgtgaatgatctggcaagacaactgaccaccctggggatccaattgtcgccttacaacctgtcaaccctcgaagatcttaacacccgatggaaacttcttcaggttgcagtcgaggaccgggtgcggcagctgcatgaggcacatagagactttggacccgcatcccagcatttcctgtcgacctcggtccaagggccatgggaaagggcaatctccccaaacaaagtcccatactacattaaccatgaaacccaaaccacctgttgggaccatcctaaaatgactgaactttaccagtcgctggcagatctgaacaatgtgagatttagcgcgtacagaaccgccatgaaactgcgtcgacttcagaaagctctgtgtctggatctcctcagcctgagtgcagcgtgtgacgcactcgaccaacataacctcaaacagaatgaccagcccatggacattctgcagatcattaactgcctgactactatctacgaccgcctggaacaagaacacaacaacctggtgaatgtgcccctttgtgtcgatatgtgccttaattggctgctgaacgtctacgataccggacggaccgggaggatcagagtcctgtcatttaagacggggataatcagcctctgtaaggcacacctggaagataagtaccgttatctgtttaaacaagtcgcatcatcaaccggattctgtgaccagagaaggctgggtttgctcctgcatgattcaattcagataccacgccaactgggagaagtggcctccttcggaggttcgaacatagaaccctccgtccgttcctgtttccagttcgcaaacaataagcctgaaatcgaggcggccctttttctggattggatgagacttgaaccccagagcatggtgtggctcccagtcttgcaccgcgtagcagccgccgagactgcaaagcatcaggccaagtgtaacatttgtaaagagtgtcctatcatcggctttagatacaggagcttgaagcatttcaattacgatatctgccagtcatgcttcttttcgggtagagtagcaaagggtcacaagatgcactatcccatggtggagtactgtactcccacgactagcggtgaagatgtccgcgactttgccaaagtcttgaagaataagtttaggactaagcggtactttgcaaagcaccctcggatggggtacctgcccgtgcagactgtcctggagggagacaatatggaaactgataccatg

SEQ ID NO: 251285 - DNA, 3591 bp, synthetic construct; identical to SEQ ID NO: 251253
  misc_feature 1..3591: note = Description of Artificial Sequence: Synthetic coding sequence
  source 1..3591: mol_type = other DNA

SEQ ID NO: 251286 - DNA, 3591 bp, synthetic construct
  misc_feature 1..3591: note = Description of Artificial Sequence: Synthetic coding sequence
  source 1..3591: mol_type = other DNA
atgctctggtgggaggaggtggaggactgctacgagcgggaagatgtgcagaagaaaactttcactaaatgggtgaacgcgcaattttcgaagttcgggaagcaacacatcgagaatcttttctcagatctgcaagacggacgcagactgctggacctgcttgaaggtctgaccggacagaaactcccaaaggaaaaggggtcaactcgggttcacgcgctgaacaatgtgaacaaagcgctgcgggtgcttcaaaacaacaacgttgacctggtcaatataggatcgacggacatcgtcgatggaaaccacaagctgactctgggtttgatctggaatatcatcctccactggcaagtgaagaatgtgatgaagaatatcatggctgggcttcagcagactaattctgagaagatcctgctgagctgggtgaggcaatccactcgcaactaccctcaagtcaacgtcatcaatttcactacctcgtggtcagacggactggccctcaacgctctcatccactcacaccggccggacctgtttgactggaactccgtggtgtgccagcagtcagcgactcaacgcttggaacacgctttcaacattgcgagataccagctcggtatcgaaaagctcctggacccagaggatgtggatacgacgtatccggacaaaaagtccatccttatgtacatcacctcattgttccaggtgcttccacagcaggtttcgatcgaagcaatccaagaggtcgagatgttgcctcggccgccgaaagtgaccaaagaggaacacttccagctccaccatcagatgcactactcccagcagattaccgtgtccctggcgcagggatacgagagaacctcgagccctaagccacggttcaagtcgtacgcctacacgcaagcggcctacgttactacctcggatccgacccgcagccctttcccctcgcaacatctggaagctcccgaagataaatcgttcgggtcgagcttgatggaatccgaagtgaatttggaccgctaccagactgcactggaggaggtcctgagctggctgctgtcagctgaggacacgctgcaagcccagggcgagatctcgaatgacgtcgaagtggtcaaggaccagttccacactcatgaaggatacatgatggaccttactgcccaccagggcagagttggtaacatactccagttgggatcgaagctcatcggaaccggaaaactctccgaagatgaggaaaccgaagtgcaggaacagatgaacctccttaactcaaggtgggaatgcctcagagtcgcatcgatggaaaaacaatccaatttgcatcgcgtgcttatggatctccagaatcagaaactgaaggagctgaatgattggctgactaagaccgaggagcggacgcggaagatggaggaggaaccgctggggccggaccttgaggatctgaagaggcaggtccaacagcacaaagtcctccaagaagatctcgaacaagagcaggtgagggtgaattccctgacgcatatggtggtcgtcgtggacgaatctagcggcgaccacgccaccgccgcgcttgaggagcaactgaaggtgctgggcgaccggtgggcaaatatctgccggtggactgaagataggtgggtgttgctccaggacattctgctgaagtggcaacggctgaccgaagagcagtgcttgttttcggcgtggctctccgagaaggaagatgccgtgaataagattcacaccaccggctttaaagaccaaaacgaaatgctgtcgagccttcaaaagttggccgtgctgaaagccgatctcgaaaagaagaagcagtcaatgggaaagctctattctctcaagcaggacctgctgtccactctgaagaacaaatctgtgacgcaaaagaccgaagcatggctcgacaactttgctcgctgctgggataacctcgtccagaagctggagaaaagcaccgcacagatatcgcaggctgtgacgaccactcagccatccttgactcagaccactgtgatggaaaccgtcactaccgtgactacccgggagcaaatcctggtgaagcatgcgcaagaagagctgccgccacctccgccccagaagaagcgtcagatcactgtggacactctggagcgacttcaggagctgcaagaagcgactgacgaattggacctgaagctgcgccaggccgaggtgatcaaaggatcgtggcaaccggtgggagatctgctgatcgactcgctgcaggatcatcttgaaaaagtcaaggcgctcagaggagaaatcgccccgcttaaagaaaatgtgtcccacgtgaacgacttggctcgacagctcactactctgggaattcagttgtcgccttacaacctctccacccttgaagatctcaacactagatggaagctcctccaagtggctgtggaggatcgcgtgaggcagctgcacgaggcccatcgcgatttcggcccagcatctcagcatttcctgtcgacgtcggtccagggcccgtgggagcgggcaatcagccctaacaaagtgccatactacatcaatcatgagacgcagactacttgttgggaccacccaaagatgaccgaactgtatcaaagcctggccgacttgaacaacgtgcgcttctcagcctaccgcaccgccatgaagctgcggaggctccagaaagcgctgtgtcttgatctcttgtcactctcagcagcatgcgacgcactggaccagcacaatctgaagcagaacgaccaaccgatggacattctccagattatcaactgcctgaccactatctacgatcgcctggaacaggagcataacaatttggttaacgtcccgctgtgcgtcgacatgtgcctgaattggctgttgaacgtctacgatactggccgcaccggacgaatccgggtgctctcctttaagaccggaatcatcagcctctgcaaagcgcatctggaagataagtataggtacctgttcaagcaggtggccagcagcaccggcttctgcgatcagagacggctgggattgctcctgcacgattctattcagatacccagacaactgggggaggtcgcatcctttggaggttcaaacatcgaaccgtctgtccggagctgtttccagtttgccaacaataagcccgaaatcgaagcggcactgttcctggattggatgcggttggagccacaatcaatggtgtggttgccggtgctgcacagagtcgccgcagctgaaaccgccaagcatcaagccaagtgcaacatctgcaaagaatgcccaatcatcgggtttcgctaccgctcactcaagcactttaactacgatatctgccaaagctgtttcttctcgggacgggtggctaaaggccacaagatgcactacccgatggtggagtactgtacgcccactacctccggcgaggacgtgcgggactttgcaaaggtgctcaagaataagttccgcacgaagaggtacttcgctaagcatcctcggatgggatacctcccggtgcaaactgtccttgaaggagacaacatggaaaccgatacgatg

SEQ ID NO: 251287 - DNA, 3591 bp, synthetic construct
  misc_feature 1..3591: note = Description of Artificial Sequence: Synthetic coding sequence
  source 1..3591: mol_type = other DNA
atgttatggtgggaagaagtggaggattgctacgagcgtgaggatgttcaaaaaaagactttcacaaaatgggtcaacgcacaattcagcaaattcggaaaacaacatatcgaaaacctcttctccgacctccaggacggccggagattactggatctgctcgaaggcctgactggccaaaaactgcctaaggagaagggatccacaagggtccatgccctcaacaacgtcaacaaagccctgcgggtgctccagaataataacgtggacctggtcaacatcggctccacagatatagtggatggtaatcacaaattgaccctgggcttaatctggaacatcatcctccactggcaggtgaaaaatgtgatgaagaatattatggctggcttgcaacagacgaattctgaaaagatcctgctgtcctgggtgcgccagagcacacgtaactatccccaagttaatgtcatcaacttcaccacttcatggtccgacgggctggccttgaacgcactgatacacagccaccgacccgatctttttgattggaactcggtggtgtgtcagcagagcgccactcagaggctcgagcatgcctttaacattgcaaggtatcaactcggcatagagaagctgctggacccagaagatgtcgataccacttatcctgacaaaaaaagcatactaatgtatatcaccagcctgtttcaggtcttgccccagcaggtctccatagaggcaatccaggaagtggagatgcttccaaggcccccaaaagttacaaaagaggaacatttccagttacatcatcagatgcactatagccagcaaattaccgtctccctagctcagggctatgaaagaacatcctcacctaagcctagattcaagtcctacgcctatacgcaggccgcttacgtgaccactagcgatccgacccgatctccatttccctcccagcacttagaggcaccagaggacaagagtttcggttcatccctgatggaatccgaagtcaatttagacagataccagaccgctctggaggaagtactctcctggctgctgtcagcggaagacaccctgcaggctcagggagaaataagtaacgatgtggaagttgtcaaagaccagttccatactcatgagggatacatgatggacctgacggcacaccagggccgtgtgggcaatatcctacagctgggatcaaaattgatcggaacaggaaagctctccgaagatgaagaaactgaagtccaggaacaaatgaatttgctgaattcacgctgggagtgtctccgggtggcctccatggagaagcagagtaacctccaccgcgttctcatggatcttcagaatcagaagctcaaggaactcaacgactggcttaccaagacggaggagcgtacccgcaaaatggaggaagaacctctgggacctgacctggaggatctgaagaggcaggtccagcagcataaagtacttcaagaggatctcgaacaggagcaggttcgggtcaatagcctgacccacatggttgtggtcgtggacgagagcagcggggatcacgcaacagccgctttggaagaacaactaaaagtcctgggcgaccggtgggctaacatatgccgctggactgaggatagatgggtgttgcttcaggacattctgctcaagtggcagcgcctgacagaggagcagtgcctgttctctgcctggctgtctgaaaaagaggatgctgttaataagatccatactacgggtttcaaggatcagaacgaaatgctgagctctcttcagaagctagctgtgctaaaagctgatctggaaaagaagaaacaatccatgggcaaattatactcactgaaacaagaccttctgtctactctgaaaaataagagcgtgactcaaaaaacggaagcctggctagataactttgcccggtgttgggataatctggtacaaaagctggagaagagtactgcccagatatcccaggcagtcactaccactcaaccttcacttacgcaaacgactgtgatggagaccgtcacgactgtgaccaccagagaacaaattttggttaagcacgctcaggaggaactcccacccccgcctccacagaagaaaaggcaaattactgtggacacacttgagcgtttgcaggaactgcaggaagccacggacgaacttgacctcaaactgcggcaagccgaggtcataaagggctcttggcagccagtcggtgacctcctaattgattcccttcaagatcaccttgaaaaggttaaggcattgagaggcgaaatcgcacctctaaaagagaatgtaagccatgtgaatgatctggcccgccaactaacaacactcggcattcagctttccccttataatctgagtaccctggaggatctgaacactcgctggaagctgctgcaagtggccgtggaggatagagtaaggcagcttcacgaagcgcacagagattttggaccagcttcacagcatttcttgtcaacatcagtccaggggccatgggaacgtgctatctcacctaataaggtgccatactacatcaatcatgaaacccaaacaacctgctgggatcatcccaagatgacagaactgtaccagagtctggctgatctgaataacgtgaggttcagcgcctatcggacggcaatgaagctgagacgcctgcagaaggctctctgtctggatctgctcagcctatcagcggcttgtgacgccttggaccagcataaccttaagcaaaatgaccagccaatggatatcctgcagatcattaattgcctcaccaccatctacgacagactggagcaagaacacaacaacttggtgaatgtaccattgtgcgtggatatgtgcctgaattggctgttgaacgtatatgatactggccgcacaggacgaatcagggtgctctcttttaagacaggaatcatctctctgtgcaaggcacacctggaggacaagtaccgttacctgtttaagcaggtcgctagcagcaccggattctgtgatcaacgacggctcggtctgctcttacacgactcaattcagattccacggcagctgggagaagtggcctcctttgggggcagtaacattgagccatctgtcagatcttgtttccagttcgccaataataaacctgaaattgaggcagcgctgttcctggattggatgcggttggagccccagagtatggtgtggcttcccgtgctgcaccgcgtggcggcagccgagacagcaaaacatcaggccaagtgcaacatttgcaaggaatgccctataattggtttccggtatagatcccttaagcattttaactatgatatatgccaaagttgtttcttctctgggagagtagctaagggacataaaatgcactatcccatggttgagtattgtactccaactaccagcggtgaggatgttagggacttcgcaaaggtgttaaagaacaagttccgcaccaaaaggtacttcgccaaacatcctcggatgggctatctgcccgtgcaaacggtgctggagggcgacaatatggaaacggacaccatg

SEQ ID NO: 251288 - DNA, 3591 bp, synthetic construct
  misc_feature 1..3591: note = Description of Artificial Sequence: Synthetic coding sequence
  source 1..3591: mol_type = other DNA
atgttgtggtgggaggaggttgaggactgttacgagagggaagacgtgcaaaagaagaccttcacgaagtgggtgaacgctcagttcagtaaatttggcaagcaacacatagagaaccttttctccgatctgcaggacggtagacggctactagacctcctagaagggctcactggccaaaagctccccaaagagaaaggaagtacccgagtgcatgcacttaacaatgtaaataaagccctgagagtgctgcagaataacaatgttgatcttgtcaacattggctccacagatatagtggacgggaaccataagttaaccttggggctgatatggaatattatcctccattggcaggtgaagaatgttatgaaaaacattatggcagggctgcagcaaaccaatagtgagaagattctgttatcttgggtgagacagagcacacgtaattatcctcaggtgaacgttattaattttacaacatcctggtccgacggcctagcactgaacgccttaatccacagtcaccgcccagacctttttgactggaactcagttgtctgtcagcagtctgccacgcagaggcttgagcatgcattcaacattgccaggtaccaactgggaatcgagaagctgctggatcctgaggatgtggatacgacttatcccgataagaaatctattctcatgtacatcacgtccctatttcaggtgctgcctcagcaagtgtctatcgaagccatccaggaggtggaaatgctgcccaggcctcctaaggtcacaaaggaggagcactttcagctgcaccaccagatgcactatagccagcaaataacggtctcgctagctcagggttacgagagaacatcgtccccaaagccgcgatttaagagctatgcttacacacaagcagcatatgtcactacatccgaccccactcgatcccccttcccttcacagcacttagaggcccctgaagataagtcgtttggctctagccttatggagagtgaggtaaacctcgatcggtatcagactgcactggaggaagtgctttcttggctgctgagtgcagaagatactctgcaggcacagggggagattagtaatgatgtggaagtggtaaaagatcagttccacactcatgaggggtacatgatggatctcactgcccaccaggggcgggtcgggaacatcttgcagttgggaagtaagctgataggcactgggaagttgtctgaggacgaagaaacagaagtgcaagagcagatgaacctcctgaactcccgctgggagtgtctgcgagtagcctctatggagaaacagagcaatctgcaccgtgttttaatggacctgcagaatcaaaagctgaaggagctcaacgactggttgacaaagacagaggaacggacccggaaaatggaggaagaacccctgggtcccgacttagaggatttgaaacgccaggtgcagcagcacaaagtgctgcaggaagacttggaacaggagcaggtccgagtgaactcactgacccatatggttgtagtggtcgacgagagctccggagatcatgctaccgctgccttggaggagcagctcaaagtgttaggggacaggtgggcaaacatttgccgctggaccgaagataggtgggtgttgctccaggatattctgctgaagtggcagaggctcaccgaggaacagtgtctgttctccgcatggctttctgagaaagaggacgcggtgaataaaattcacaccaccggcttcaaagatcagaacgaaatgttgagttccctgcagaagttagcagtcttaaaagccgacttggagaagaaaaaacagtccatgggcaaactgtattctttaaagcaggatctactgtcaaccctgaagaataaatctgttactcagaagaccgaagcttggcttgataactttgcccggtgctgggataacctcgtccagaaacttgagaagagcaccgctcagatatctcaggcagtgactaccacacaaccatcactgacccaaactacagtcatggagaccgtgacaaccgttacaacccgcgagcaaatcctggttaaacacgcacaagaggaactaccgccaccaccgccacagaaaaagaggcagatcactgtcgatacgctcgaacggttgcaggaactgcaggaggccaccgatgaactggacctgaagctgaggcaggctgaagttatcaagggatcctggcagccagtcggggatctgctgattgacagtctgcaagaccacctggagaaggtcaaggcactaaggggcgaaatcgcccccctcaaggagaatgtgtcacacgttaacgacctggcgcggcaacttaccacactgggtattcaactgagcccatacaacctgtccaccctcgaggacctgaatacacgctggaaactgctgcaagttgccgtggaagatagagtgcgacaactacacgaggcacatagagactttgggccagccagccagcatttcctctcaacaagcgtgcaaggcccatgggaacgtgccatctcacccaataaagtcccgtactacataaaccacgagacccaaacaacatgttgggatcaccctaaaatgaccgagctgtatcagtccctggcggatttgaataacgtccgtttcagcgcctaccggactgcgatgaagttaaggcggctgcagaaagcactgtgtctggacctcctctctctcagcgccgcctgtgacgcacttgaccagcataatcttaaacagaacgaccagcccatggacatcctacagatcataaactgtcttacaactatctacgaccggcttgagcaggagcacaataatctagtcaacgtgcctttatgtgtggatatgtgtctgaattggcttctgaacgtgtacgacacaggtcgcacgggcagaatcagggtgttatcattcaaaacgggaatcatctctctctgtaaggctcacctagaggacaagtatagatatctcttcaagcaggtcgcatcgtccaccggattttgtgaccagaggcgattggggctcctgctccacgattctatacagatcccacgacagttaggagaagtggccagcttcggtggctcaaacatcgagccatcggtgaggtcatgctttcaatttgccaataataagcccgagattgaggcggcactttttctcgattggatgcgcctggagccccagtctatggtatggttacctgtgctgcaccgcgtcgccgctgctgagacagccaaacaccaggcaaaatgcaacatttgtaaagaatgccccattatcggattcaggtatagatctttaaaacactttaactatgacatctgtcagtcctgtttctttagcggcagagttgctaagggtcacaaaatgcactaccctatggtcgagtactgtacccctactacatcaggcgaggatgtgcgcgattttgctaaggtcctgaagaacaagttcagaactaagcgctattttgctaaacacccccgcatgggctatcttccagtccagaccgttctggagggtgacaatatggagacagatacaatg

SEQ ID NO: 251289 - DNA, 3591 bp, synthetic construct
  misc_feature 1..3591: note = Description of Artificial Sequence: Synthetic coding sequence
  source 1..3591: mol_type = other DNA
atgctttggtgggaagaagtggaagattgctatgagcgcgaagatgtgcaaaagaaaacgtttaccaagtgggtcaatgcgcagtttagcaagtttggtaagcagcatatcgaaaacctcttttccgatctccaggatgggcggcggctgcttgatcttctggaaggtctgactggacaaaaactgccaaaggaaaagggttcgactagagtgcatgctctgaataatgtcaacaaagctcttagggtgcttcagaataacaacgttgatcttgtcaatataggtagcactgatattgtggatggaaaccacaaactcactttgggtctgatatggaacattatcctccattggcaagtgaagaacgttatgaaaaacatcatggcgggacttcaacaaaccaactcagaaaagatacttctgtcctgggtgagacagtctactagaaactacccccaagtcaatgtgattaacttcaccacttcctggtccgatgggctggcactcaatgcgcttattcactcgcatagaccagacttgtttgattggaactccgtggtctgccagcaaagcgcaacccaacgtctggaacatgcatttaacatcgcacgataccaacttggtatcgaaaagctgttggaccccgaggacgtggataccacctaccctgataagaaatcaatactcatgtacataacttccctgtttcaggtcctcccccagcaagtcagcattgaagccatacaagaagtggaaatgctgccccggccacccaaagtcactaaagaggaacattttcaactccatcatcaaatgcactacagccaacagatcaccgtgtccctcgcacaagggtacgagcgtacttcgtcgccaaaacctagatttaagtcctacgcctacacgcaggcggcatacgtcaccacttcggatcctaccaggtcccctttcccgagccaacatctggaagcacctgaggacaaatccttcggctcgagcctgatggaatccgaggtgaacctggatcgttaccagaccgcactggaagaagtcctgtcttggctgttgagcgctgaggacaccctccaagcacaaggcgaaatttcgaacgacgtggaagtcgtgaaggatcaattccatacgcatgaaggctacatgatggacctgaccgctcatcagggacgagttggtaacattctgcagttggggtccaaactcattgggactggtaagttgtcagaggacgaagagactgaggtgcaagagcaaatgaacttgctcaattcgaggtgggaatgtctgagagtcgcatcgatggagaagcagtcgaacttgcatcgggtcctgatggacctccagaaccagaagctgaaggagttgaacgattggctgaccaagacggaagaacgcacccgtaaaatggaagaagaacctctgggccctgacctggaagatctcaaaagacaagtccaacaacataaggtgttgcaggaagatctcgagcaggaacaagtcagagtgaactcgctgacccacatggtggtcgtggtcgatgagtcctcgggggatcatgccaccgccgcacttgaggagcaacttaaggtgctgggtgatcgctgggcaaacatctgccggtggaccgaagatcggtgggtgctcttgcaagatattctgcttaagtggcagcgtctgactgaagaacagtgtcttttcagcgcatggcttagcgaaaaggaggatgcggtgaacaagatccacacgacgggatttaaggatcagaacgaaatgctgagctctctgcagaaactggcagtccttaaagcagatctcgagaagaagaagcaaagcatgggtaaactctattccctcaagcaagatctgctttccactctcaaaaacaagtcagtcactcaaaaaaccgaagcgtggctcgacaacttcgcaagatgttgggacaacctggtccaaaagctcgaaaagtccaccgcccaaatatcccaggccgtcaccactacccagccatcgctcactcagactactgtcatggaaaccgtcactacggtgactaccagagaacagatccttgtgaaacacgcccaggaagaacttccaccacctccaccacaaaagaagaggcaaataactgtcgacactcttgaacgcctgcaggagcttcaggaggcaaccgatgaactggatctgaagctgcggcaagcggaagtgattaagggatcctggcaacccgtgggtgaccttcttattgactccctgcaggaccacctcgaaaaggtcaaagcattgagaggggaaattgcacctctgaaggaaaatgtgtcgcatgtgaacgatctggcgcgtcaactcacgactcttggaatccagttgtcgccttacaatctgtcgacccttgaagatcttaacaccagatggaagctccttcaggtggccgtggaagatcgagtgagacaacttcatgaagcccacagggattttggcccagcatcgcaacactttctgtccactagcgtccaaggtccatgggaaagggcaatctccccgaacaaggtcccttactatatcaaccacgagactcaaactacttgttgggatcatcctaagatgacggagctgtaccagtcactggcggatctgaacaatgtgcggttttccgcatacagaaccgcaatgaagctgcgtagactgcaaaaggcactgtgtctggatctgctgtcgctctccgcagcctgtgatgcactcgatcagcataaccttaagcagaacgaccagcccatggatattctgcagatcataaactgtctcaccaccatctacgatagactggaacaggaacataacaatctggtgaatgtgcccctttgtgtggatatgtgcctgaactggctgctgaacgtgtacgataccgggaggaccggtcgcatcagggtgctgtcgttcaaaaccggaattatctccttgtgtaaggcccaccttgaggacaaatatcgttaccttttcaagcaagtggcttcatcaaccggattttgtgaccaacgtagactggggcttctgttgcatgattcaattcagattcctcgacagctgggtgaagtggcatcgttcggagggtcgaatattgagccgtctgtgagaagctgttttcagttcgccaacaataagccagaaattgaagcagcgctgtttttggattggatgcggcttgaaccccaatcaatggtgtggctgccagtgctccaccgggtggctgcagctgaaaccgcaaaacatcaagcaaagtgtaacatctgcaaagagtgcccaattatcggatttcggtaccgatcactgaagcactttaactatgatatttgccagtcgtgttttttctcaggcagagtcgcaaagggccacaagatgcactacccaatggtggagtactgtaccccaaccacttccggtgaagatgtcagagattttgccaaggtgctgaagaacaagtttcgaactaaacgttactttgctaagcatcctcgcatgggatacctgcccgtgcagaccgttctcgaaggcgacaatatggaaaccgacacgatg

SEQ ID NO: 251290 - DNA, 3591 bp, synthetic construct
  misc_feature 1..3591: note = Description of Artificial Sequence: Synthetic coding sequence
  source 1..3591: mol_type = other DNA
atgctgtggtgggaagaggtagaggactgttatgagagggaagacgtccagaagaaaacttttacgaagtgggtgaacgcacagtttagtaagttcggcaaacagcacattgagaatctgttttctgatctgcaggatgggcgacggctcctagatctcctggagggactgactggtcaaaagctgcctaaggagaagggatccacgcgtgtccatgctttaaacaatgtgaataaggccttacgtgttctccagaataataatgtagatttggtaaacatcggaagcactgatatcgttgatgggaaccataagctgacgctgggcctgatttggaacatcattctgcactggcaggtgaagaatgtgatgaaaaacatcatggcgggattgcaacagacaaacagcgagaaaattttgttgagttgggtgagacaatcaaccagaaactacccccaggttaacgtgataaatttcaccacaagttggagtgatggattagcgctgaacgcattgattcacagccacaggccggatctgtttgattggaattccgtagtatgccagcagagcgcaactcagcgcctggagcatgcttttaatatcgcaaggtaccaactgggcattgagaaactgctcgacccagaggacgttgatacaacctaccccgacaagaagagcattctgatgtacataacgtccctgtttcaggtcctcccacaacaggtgtcaatcgaggctatccaggaggtcgaaatgctaccaagaccaccaaaagtgactaaagaggagcacttccagctccaccatcagatgcactactcccagcagatcacggtctctctggctcagggctacgagaggacatcctctccgaaacctaggtttaagagttatgcttacacacaggccgcctatgtgacaacgagcgatcccacaaggtccccctttcctagccagcacctggaagccccagaagacaaatcttttggcagttccctgatggagtcagaggtcaatctcgatcggtaccagactgcattggaggaggttttgtcctggctcctgagcgccgaggacactctccaggcccagggagaaataagcaatgatgtggaagttgtcaaggatcagttccatacccatgaggggtacatgatggacctgacagcacaccagggaagggtggggaacattctgcaactggggagcaaattgattggcaccggtaaattgtctgaggatgaggagacagaggtccaagagcagatgaatctactgaattcaagatgggagtgcctcagagtcgcatcaatggaaaaacagtcaaaccttcatagggtgctgatggacctccaaaatcagaagttgaaggaactgaacgactggctaactaaaaccgaggagcgtaccaggaaaatggaggaggaaccactgggccctgatctcgaagacctcaagcgccaggttcaacagcacaaggtccttcaggaagatctcgagcaagaacaggtgcgggtcaacagccttactcacatggtggtggtggtagatgagtcctcaggcgatcacgccaccgcagcgctggaagaacagctaaaggttctgggggaccgttgggccaacatttgccggtggactgaggatagatgggtcctgctgcaggatattcttctcaaatggcaacggctaacagaagagcagtgcctctttagtgcctggctctcggaaaaggaagacgccgttaataagattcacaccaccggatttaaggaccagaatgagatgctttcatctcttcagaaactggctgtgctaaaagccgatcttgaaaagaagaagcagtctatgggcaagttgtactcactgaaacaagatctcctctccaccctgaagaacaaatcagtaacccagaaaaccgaagcctggcttgacaacttcgccagatgttgggacaacctggtacagaagctggaaaagtctaccgcccagatatctcaggcagtcactactactcaacccagcctcacccagactacggtcatggaaactgtgaccactgtgaccactcgggagcagatcttggtgaaacatgcgcaggaagagctgccccctccaccaccccagaaaaagcgtcaaatcacagttgacacactcgagcggctgcaagaacttcaggaagcaacagacgagctggatctgaagctgcgccaagctgaggtgattaaaggatcatggcagcctgtgggagacctgcttatcgactctctgcaggatcatctggaaaaagttaaggcactgaggggtgagatcgcacctctcaaggagaatgtcagccatgtgaatgatctggcacgacagctcacaacacttggcatacagctttctccctacaatctctctactctggaggacttgaataccagatggaaacttttacaggtcgccgtggaagaccgggttagacagttgcacgaggctcaccgagacttcggccctgcgtctcagcattttctgtccactagcgtgcagggcccatgggaaagggccatttctcctaacaaagtcccatactatataaatcacgagacccagactacctgttgggaccaccccaagatgactgaactgtaccagagcctcgccgacctcaataacgtcagattctcagcatatcggactgccatgaagctccgtaggctacaaaaggcgctctgtctagatctgctgagtctgagtgcagcctgtgacgctttggatcagcacaaccttaagcagaacgaccagcctatggatatcctgcagatcatcaattgtttaacaacaatctacgatagactagaacaggagcataataatctcgtgaacgtgccactctgcgtcgacatgtgtctgaactggctgctgaacgtatacgacactggccgaaccggtagaatccgcgtgctgtcattcaaaaccggcatcatttctctttgcaaagcgcacttagaggacaagtaccggtacctgttcaaacaggtcgcttctagcaccgggttttgcgatcaaagaaggttaggcctcctcttgcacgattcaatccagattccaaggcagctcggtgaggtggcatccttcggaggctccaatattgagccgagtgtgagatcatgctttcagttcgccaataacaagcctgaaatcgaggctgcattgttcctcgactggatgcgtttggaaccccaatctatggtttggctgcccgtgctacacagggtagccgctgccgaaactgccaagcatcaggccaagtgcaacatctgcaaagaatgccctattatcggtttccggtacagaagccttaagcactttaattacgacatctgccaaagctgtttcttcagcggcagagtcgcaaaaggccacaaaatgcattaccctatggtggagtactgcacccctactaccagcggagaagatgttcgcgattttgcaaaagtgctgaagaacaaattcaggacgaagaggtatttcgcaaaacaccctcgcatgggatatctgcctgtccagactgtgcttgagggcgacaatatggagacggacacaatg

SEQ ID NO: 251291 - DNA, 3591 bp, synthetic construct
  misc_feature 1..3591: note = Description of Artificial Sequence: Synthetic coding sequence
  source 1..3591: mol_type = other DNA
atgttgtggtgggaggaggtcgaagactgctacgaaagggaagacgttcaaaaaaagacttttactaaatgggtgaatgctcagttttccaagtttggaaaacagcacatcgagaacttgttctccgacctgcaggacggcaggcgcctcttggacctgttggaaggtttgacaggtcagaagctgcctaaagagaagggatccactagggtgcacgctcttaataacgtgaacaaagccctcagggtgcttcagaataataacgtggatttggtgaacatcggaagcaccgatattgtcgacggtaaccacaagctgacactgggactcatttggaatattatactccactggcaggtcaagaatgtgatgaagaatatcatggccggtttgcagcagaccaatagcgagaagattctcctgtcatgggtgcgccagtctactaggaactatccccaggtgaacgtcattaactttaccacctcttggtctgacggcctcgctctgaacgcacttatccattcccatagacccgatttgttcgactggaattctgttgtgtgccagcagtctgcaacccagaggcttgagcacgcttttaatatcgctcgttaccagctgggtatcgaaaagctgttggaccccgaagatgtcgataccacctaccccgataagaagtccatcttgatgtatatcaccagtctcttccaagtgcttccccagcaagtgtccattgaagctattcaagaagtggagatgctgcccaggccacctaaggtaactaaagaagagcatttccagcttcaccatcagatgcactatagccaacagattaccgtttctttggcccagggatacgagcgcaccagctctcccaagccaagattcaaatcctacgcctacacccaagctgcctacgtaactacctccgaccctacaagatctccatttccaagtcagcacctcgaagcccccgaggacaagagttttggaagttcactcatggaatccgaggtgaacctggacaggtaccaaactgctttggaggaggttctttcctggctgttgagcgcagaagacaccctccaggcccagggtgaaatttctaacgatgttgaagttgtcaaggaccagttccacacccatgagggctacatgatggatctcactgcccaccaaggcagggttggcaacattttgcaattgggcagtaagctgattggtactggcaagctgagtgaagatgaagaaaccgaggtgcaggagcagatgaatctcctcaactcacgctgggagtgcttgagagttgccagcatggagaagcaaagcaacctgcaccgcgttttgatggacctgcaaaaccagaagttgaaggagctcaacgactggctgaccaagactgaggagagaactagaaaaatggaagaagagccactgggccctgatcttgaggacctgaaaaggcaggtgcagcaacacaaagtactgcaggaagacctggagcaggagcaggtccgcgtcaatagccttacccacatggttgtggtcgtcgacgagagctcaggcgaccatgctactgctgccctcgaagaacagttgaaggtgcttggtgaccgctgggccaatatatgtaggtggaccgaagatcgctgggtactcctgcaggacattcttctcaagtggcagcgcctcaccgaagagcagtgcctttttagcgcatggctgagcgagaaggaggatgccgtcaacaaaattcatacaaccggatttaaggaccagaacgaaatgctctcttcactccaaaagcttgctgtcctgaaggccgatttggagaagaaaaaacagtctatgggtaagctgtattccctgaagcaggacttgctcagcaccctgaagaacaagagcgtgacacagaagaccgaggcttggctggataacttcgccagatgctgggataatctggtccagaagctggagaaatcaaccgcacagatctcacaggctgtaacaactacccagccaagcctgacccagaccacagtgatggagacagtgacaactgtcaccactagggagcagatccttgtgaagcacgcccaggaggaactgccccccccccctccacagaagaagcgccaaattaccgtggacactctcgagagattgcaagagctccaggaagcaaccgacgaattggaccttaaactccgtcaggcagaagtgattaaaggtagttggcaacctgtgggagatctgttgattgacagtctccaggaccacctggagaaggtgaaggccctgagaggtgaaatagctcctctcaaagagaatgtgtcacacgttaacgatttggccaggcagttgaccacactcggcatccagctcagcccctacaatttgtccactctggaagatctcaacactcgctggaagctgcttcaggtagcagttgaggaccgcgtaagacaacttcatgaggcacaccgcgacttcggacctgcctctcagcactttctctcaaccagtgtgcagggcccctgggaacgtgccatttcaccaaacaaagtcccctattacattaatcatgagacccaaaccacttgctgggaccatcccaagatgactgagctttaccaatccctggcagacctgaacaacgtgcgcttttccgcctacagaaccgcaatgaaactgaggaggcttcagaaggccctctgcctggatctcctgagcctgtccgccgcctgtgacgccctggaccaacacaacctcaaacaaaatgaccagcctatggatatacttcaaatcatcaattgtctcactaccatatacgatcgcctcgagcaagagcacaacaaccttgtgaatgtccctctgtgtgtggacatgtgcctgaattggctgctcaacgtctacgacaccggacgcacaggtcgtatccgcgtgttgagcttcaagactggtatcatctctctgtgcaaggcccatctcgaagataaatatcgttacctctttaagcaggttgctagtagcacaggtttctgtgaccagaggaggttgggactgctgctgcacgacagtatccagatccctaggcagttgggtgaggtcgcctcttttggaggctcaaacattgaaccaagtgtacgctcttgtttccagtttgcaaataacaaacccgaaattgaggccgcactgttcttggactggatgagactcgagccacaatccatggtgtggcttccagtcttgcacagagtggctgcagcagaaactgccaagcaccaggcaaagtgcaacatctgtaaggagtgccccatcattggttttcgctacaggtccctgaaacatttcaactacgacatctgccagtcatgttttttctccggtagagtcgcaaagggtcacaaaatgcattatcccatggtggagtattgcactcccacaacaagcggcgaagacgtccgcgacttcgcaaaagtgcttaagaacaagttccgcaccaagagatactttgcaaaacatcccagaatgggatatctgcccgtccaaactgtcctggagggagataatatggaaaccgatactatg

SEQ ID NO: 251292 - DNA, 3591 bp, synthetic construct
  misc_feature 1..3591: note = Description of Artificial Sequence: Synthetic coding sequence
  source 1..3591: mol_type = other DNA
atgctttggtgggaagaagtggaggactgttacgaacgtgaggatgtgcaaaagaaaacgttcaccaagtgggtgaacgcacaattttccaagttcggtaagcaacatattgagaacttgttctccgaccttcaagatgggagacgattgctggatctccttgagggactcactggtcagaagctgccgaaagagaaaggtagcacccgcgtgcatgcactgaataatgtcaacaaggcgctgagagtgctgcaaaacaataatgtggatcttgtgaacatcggatcgaccgacatcgtggatggaaaccacaagctgaccctcggactgatctggaacattatcctccattggcaggtcaagaacgtgatgaagaacattatggccggccttcaacagaccaattccgaaaagattctcctgagctgggtgcgccaatcgaccaggaactaccctcaagtgaacgtgattaactttactacctcctggtcagacggtcttgcgctgaacgcactcatccattcgcaccggcctgaccttttcgattggaattccgtggtttgtcagcaatcagctactcagcggctcgaacatgcattcaacatcgcaagataccaactgggtattgagaaattgttggatccagaggacgtggataccacctacccggataagaagtccattctcatgtacattacttcgctctttcaggtgctccctcagcaagtcagcatagaagcaatccaagaagtggaaatgcttccccgtccgccaaaggtgacgaaggaagaacatttccaactccatcaccagatgcactattcacaacaaattaccgtgtcgctcgcacagggatacgaacgaacctcgagccctaagcctaggttcaagtcatacgcatacacgcaggcagcctacgtcacgactagcgatcccactaggtcgcctttccctagccagcacctggaggcgcctgaagataaatcgtttggcagttcactgatggaatcagaagtcaatctggatcgttaccaaaccgccctcgaagaagtgctgtcctggctcctgtcggcggaagatactctgcaagcgcaaggagaaatttctaacgacgtggaggtggtcaaggaccaattccacacccacgaaggatacatgatggacctgaccgcacatcaaggaagagtggggaatattctccaactcggatcaaaactcatcggcacgggaaagctcagcgaagatgaggaaactgaagtgcaagagcagatgaacctcctcaactctaggtgggaatgtctcagagtggcatctatggaaaaacagtccaatctccatagggtccttatggatcttcaaaaccaaaagctcaaggaacttaacgactggctcactaagaccgaggaacggacccgcaaaatggaagaggagcctttgggtcctgacctcgaagatcttaagcgacaggtgcaacagcataaagtccttcaagaagatctggaacaggaacaggtgagggtgaattcccttacccacatggttgtggtggtggacgaatcgagcggcgaccatgcaaccgctgcgctcgaagagcaactgaaggtcctgggcgatagatgggcaaacatttgtagatggaccgaagatcgatgggtgctgctgcaagacattctgttgaagtggcaacgccttactgaagaacagtgcctgttctcggcatggctgtccgaaaaggaagatgcggtgaacaagatacataccaccggatttaaggatcaaaatgaaatgctgtcaagccttcaaaaacttgccgtgctgaaggcagatctcgagaagaaaaaacaatcgatgggcaaactgtactcgctgaaacaggatctgctgtccaccttgaaaaacaagagcgtgacgcagaaaaccgaagcatggcttgacaatttcgcaagatgttgggataatctggtccaaaagttggaaaagtcaactgcacagatcagtcaagcagtcactaccacccagccctcacttactcagaccaccgtgatggaaaccgtaaccaccgttaccactagagagcagattctcgtcaagcatgcacaagaagaacttcctcctccacctcctcagaagaagcggcagattactgtggatacccttgagcgcctccaggaactccaagaagcaaccgacgaacttgacctgaagctccgccaagcagaagtgattaagggatcatggcagcctgtcggggacctgctgattgattcacttcaggaccatctcgaaaaggtgaaagcacttagaggggagattgcacctctgaaagaaaacgtgtctcatgtgaacgatttggcgcggcagctgactacccttggcattcaactctccccttacaacctgtccactctggaggatctgaacactcgatggaagctcctccaggtggccgtcgaagatagggttcggcaactccatgaagcacatcgggactttggtcccgcctcccaacactttctctcgacctcagtgcaaggaccctgggaaagggcaatctcacctaataaggtgccttattacattaatcacgagactcagaccacttgttgggatcatccaaaaatgaccgagctgtaccagtccctggcagaccttaacaacgtgcggttttccgcataccggactgcaatgaaacttcggcggcttcaaaaagcactgtgtctggatctcctgtcactttccgcagcttgtgacgctttggatcaacacaatttgaagcagaacgaccaaccaatggatattctgcagatcattaactgtcttactaccatttacgatagactggaacaggagcacaacaacctggtgaacgtcccgctttgcgtggatatgtgtctcaactggctcctgaatgtttacgatactggacgcacgggaagaattagagtgctctccttcaaaactggtatcatttcactttgtaaagcgcatttggaggacaagtatagatacctgttcaaacaggtggccagctccactggattttgtgaccaacgtcgactcggcctgctgcttcatgactccatccaaataccccgccaactgggtgaagtggcatcgtttggaggatcgaatatagaacctagcgtccgaagctgttttcagtttgccaacaacaagccggaaattgaagcagcattgtttcttgattggatgagacttgaaccacaatcaatggtctggttgccagtccttcatagagtggctgcggccgaaactgccaaacaccaggcaaagtgcaacatttgtaaagaatgccctatcataggctttaggtaccgatccttgaagcatttcaactacgatatatgccaatcgtgtttcttttctggacgagtcgccaaggggcacaaaatgcattaccctatggtggagtactgtacccctactacttcgggagaagatgttcgcgatttcgccaaggtactgaagaataagtttcggaccaagagatacttcgctaagcatccaaggatgggttacctccccgtgcaaaccgtccttgaaggagataacatggaaaccgataccatg

SEQ ID NO: 251293 - DNA, 3591 bp, synthetic construct
  misc_feature 1..3591: note = Description of Artificial Sequence: Synthetic coding sequence
  source 1..3591: mol_type = other DNA
atgctctggtgggaagaggtcgaggattgctacgagagagaggatgtgcaaaaaaaaactttcactaaatgggtgaacgctcaatttagtaagttcggcaaacagcatatagagaacctgttttccgatctgcaggacggacgccgcctgcttgaccttttggaaggcctgaccggccaaaagcttcccaaggagaagggctccacgcgagtccacgcactgaacaatgtgaataaagctctccgggtgctgcagaataacaatgttgatctcgtgaatatcggctccacagatatcgtggatgggaaccacaagctgactctgggcctcatatggaacataatactgcactggcaggtgaagaatgtgatgaagaatatcatggccggactccagcagacaaatagcgagaagatcctgctcagctgggtaagacagtcaacacgaaactaccctcaagtgaatgtgatcaactttactacatcctggtcagacggactggcccttaatgctcttattcactctcaccggcctgacctttttgattggaattctgtcgtatgccaacagtccgcaacccagcgactggagcacgcattcaatattgctcggtaccagttgggaattgagaagttgttggacccagaagatgtggataccacctaccccgacaagaagagcattctcatgtatattacgtccctttttcaggtgctccctcagcaggtgtcaatagaggctatccaggaggtcgaaatgctgcctcggccccccaaggtcacaaaggaggagcactttcagttgcatcaccagatgcattacagtcagcagatcaccgtctcactggcgcagggctacgaaagaacatcttcacccaagcctcggttcaagtcttacgcctatactcaagccgcctatgtaacgacctctgatcccaccagaagtccctttccatcccagcacctggaagcccctgaagacaagtcctttggatcttctctgatggaatctgaagtcaaccttgaccgctaccaaacagctcttgaggaggttttgtcctggctgctgagcgctgaagacacgctgcaggcgcagggggagatatcaaatgacgtggaggtggtcaaagaccagttccacacccacgaaggttacatgatggacttgacggcacaccagggccgcgtcggtaacattctgcagctgggtagcaaactgattggaaccggaaagctgtcagaagacgaggaaacggaggtgcaggagcaaatgaatcttttgaactcccgctgggaatgtttgcgcgtcgccagcatggagaagcagtccaatttgcatcgcgtcctgatggacttgcagaatcagaaacttaaggagctcaatgactggctgaccaaaacagaagagaggacgaggaagatggaggaggaacccctgggccctgacctcgaagatctgaagcgccaggtgcagcagcataaagtgctgcaggaagatcttgagcaggagcaggtccgcgtcaactccttgacacatatggtggtcgtcgttgacgagtctagcggtgaccatgcgacagccgctctggaagagcagctgaaggtgctcggcgatagatgggccaatatctgccggtggacagaggataggtgggtgctgctgcaggacatcctgcttaaatggcagcggctcacagaggagcagtgtctgttcagcgcatggctgtcagagaaagaagatgccgtcaacaagattcacacgacaggctttaaagaccagaacgagatgttgtccagtctgcagaaacttgccgtgctgaaggcggatcttgaaaaaaagaagcagagcatggggaaactctactccctgaagcaggacctcctctctaccttgaagaataagtctgtgacccagaagactgaggcgtggctcgataattttgcaaggtgctgggataacctggtacagaaactggagaaaagcaccgcacaaattagccaagcagtgaccacaacccagccctctctcacacagaccacagtgatggaaacggtgaccactgtgaccacacgggagcagatcctggtgaagcacgctcaagaggagcttcctcctcccccccctcagaagaagcgacagataaccgtcgataccctcgagcggttgcaagaactgcaagaggcaacagacgaactggatctgaaactgcggcaggctgaggtcatcaagggaagttggcagcctgttggagatctccttattgatagcctgcaggaccacctggagaaggtgaaagccttgcgcggtgagattgcccccttgaaggagaatgtgtctcacgtcaacgatctcgctaggcaactcacgacactggggattcagctgagcccttacaatctgtcaacattggaggacctgaataccaggtggaaactgttgcaggtggcggtggaggatagagtcaggcagctgcatgaagcgcaccgcgacttcggaccagcatctcagcacttcctgagcacgagcgtgcagggaccatgggagcgagcaatctcccctaacaaagtaccctactacatcaatcacgaaacacaaaccacttgctgggaccatccgaaaatgaccgagctgtaccagtctttggccgatctcaataatgttagatttagcgcataccgcacggcaatgaagctgagacgactgcagaaagccctgtgtctggatctcctctccttgagcgccgcctgcgatgcactggaccagcacaacctgaaacagaatgaccagccaatggatatacttcaaataatcaactgcctcaccactatttatgaccggctggaacaggagcataataacctcgtgaacgtacccctttgtgtggacatgtgtttgaattggttgctgaatgtttatgacaccggaagaacaggccgcatcagggtcctctcatttaagacgggcatcatctccctctgcaaggctcacctggaagataagtaccgctatcttttcaaacaggtggcttcctccacggggttctgcgaccagcggcgcctgggactgctgttgcacgactccatccagatccctagacagctgggcgaggtcgcaagctttggtggatctaatattgagccttcagtcaggagctgcttccagtttgccaataataaaccagagattgaggctgcgctctttctggactggatgcgcctggagccacagagcatggtgtggctgccagtgcttcacagggtcgccgcagccgaaactgctaagcaccaggcgaaatgcaacatttgtaaggaatgcccaattataggcttcaggtaccgaagtctgaaacactttaactacgacatatgccagtcctgtttcttctctggccgggttgccaaaggccataagatgcactaccccatggttgagtactgcaccccgacgaccagtggcgaagacgttagggacttcgccaaagtccttaagaacaaatttcggactaagcgatacttcgccaagcaccccaggatgggttacctgccagtccagaccgtgttggagggtgacaatatggagactgacacaatg

SEQ ID NO: 251294 - DNA, 3591 bp, synthetic construct
  misc_feature 1..3591: note = Description of Artificial Sequence: Synthetic coding sequence
  source 1..3591: mol_type = other DNA
atgctatggtgggaggaggtcgaggactgctacgagagggaagacgtgcaaaagaaaactttcaccaagtgggtgaacgcacaattttctaaattcggaaagcaacatattgagaacctgttcagcgacttgcaggacggcagacgcctgctggatctgttggagggcctcacaggccaaaaactgcccaaggaaaaaggcagtaccagagtccacgcacttaataacgttaataaagctctgagggtcctgcagaacaataacgtcgatctggtcaatatcggctctaccgatatcgtcgatggaaaccacaagctgaccttaggcttgatttggaacattattctgcactggcaggttaaaaatgtgatgaagaatatcatggcagggctgcaacagaccaactccgagaagatcctgctatcctgggtccgtcagtccaccaggaattatccacaagtgaatgttatcaacttcaccactagctggtccgatggacttgctctgaacgctctgattcattcccatagacccgatttgttcgattggaactcagtggtctgtcagcagtctgctacacagaggcttgagcacgctttcaatattgctaggtatcagctgggcattgagaaactcttggaccctgaagacgtggacacaacatatcccgataaaaagagcatacttatgtatatcaccagtttattccaggtgcttccacagcaggtttccattgaggctatccaggaagttgaaatgctaccgagaccacccaaagtcactaaggaggaacactttcagctgcatcaccaaatgcattattcccagcagataacagtgagccttgctcaagggtatgagagaacttcctcaccaaaacctagattcaagagctacgcatacacccaggcagcctacgttacaacatctgaccccaccagaagtccttttccttctcagcacttagaagcgcctgaagataagagcttcgggagcagcctcatggaatccgaggtgaatcttgataggtatcagaccgctttggaggaggtgctcagctggctgttgagcgccgaggacacgcttcaagcccagggagagatttccaacgatgtggaagtggtaaaagatcagttccatacccacgaaggctacatgatggatctgaccgcccatcagggccgggttggaaatatcctccaattagggagcaaattgatcggaactggaaaactcagcgaagacgaagaaactgaggtacaggaacaaatgaacctgttgaacagccgttgggaatgtctgagagtggcatcaatggagaaacagtcgaacctccatcgggttctcatggatcttcagaaccagaagcttaaggaactcaacgactggctgaccaaaaccgaagaacgaactaggaaaatggaagaagaaccgcttgggcctgatctagaagacttaaaaaggcaggtgcagcaacacaaagtgctccaggaggatcttgagcaggagcaagtgcgtgtgaactccctcacacacatggtggtggttgtggacgaatccagcggcgaccatgctaccgctgcgttggaggagcaactcaaagtcctgggcgaccgctgggcgaacatttgccggtggactgaggatcgctgggtgcttctgcaagatatccttctcaaatggcagcgcctgacagaagagcaatgtctgttttccgcttggttgagcgaaaaagaagacgcggttaacaaaattcacacgaccggattcaaggatcaaaacgagatgctgagcagcttgcagaaactggccgtgcttaaggctgacttagagaaaaagaaacagagcatgggcaaactttactcgcttaaacaagatctgctgtccacattgaaaaacaaatctgttacccaaaagactgaggcctggctggataactttgctcgctgctgggataacctcgtgcagaaactggaaaaaagcaccgctcaaatttcccaggccgtgaccactacgcagccaagcctcacacaaacaaccgtcatggagacagtcactactgtcacaactcgggagcaaatacttgtgaaacatgcccaggaggagcttcccccaccacccccccagaaaaagcggcaaattacagttgacacactggagcggttgcaagaactgcaggaagcaacagatgagctcgatttgaagctgcggcaggcagaagtgattaaaggatcctggcagcccgtgggcgatctcctgatcgactcactccaggatcacctggagaaagtgaaagctcttagaggcgagattgcacccctgaaagagaacgtgagccatgtcaacgatctggctcggcagcttacgaccctggggatccaactctccccttataacttgagtacgttggaggatctaaataccaggtggaagctcctgcaagttgctgttgaggatagagtgaggcagctccacgaagcacaccgagactttgggcctgcttcacagcacttcctctcaacttctgtgcagggtccatgggagagagctatcagccctaataaagtaccctactacattaatcatgaaacacagaccacatgctgggatcacccgaagatgacagagctttaccagtcgctagccgatttgaataatgtcaggttctctgcttaccggaccgctatgaagttaaggaggttgcagaaggctctctgcttggaccttctgtcattgtcagcagcgtgcgacgcactggatcagcacaatctgaaacagaacgaccaaccgatggacatcctgcaaatcattaactgcctgaccaccatctacgatagactggagcaggaacacaacaacctggtcaatgtgcctctgtgcgtggacatgtgcctcaactggttgttgaacgtgtacgacactggcaggacaggtagaatcagggtgctctctttcaaaacgggaattatcagcctttgtaaggcccacctggaggacaaataccggtacttgtttaagcaggtggccagctccactgggttctgcgatcagcgcagactcggtttactgcttcatgacagcatccaaatccctcgccaattgggtgaagtcgcatcttttggcggatccaacattgagcctagcgtgagatcgtgttttcaatttgcgaataacaaacccgaaatcgaagcagctcttttcctggattggatgcgcctggagcctcagtcaatggtgtggctgcctgtgctgcatagagtggccgcagctgaaacagcgaagcaccaagcgaaatgcaatatttgtaaagagtgtcctattattggattcaggtaccggtctctgaagcatttcaactacgatatatgccaaagctgctttttttcagggagggttgccaaaggacataagatgcactaccctatggtagagtattgcaccccaaccacctccggggaagatgttagagatttcgccaaggtgcttaagaacaagttcagaacaaagagatactttgccaaacaccctcgtatgggctatcttccagtacaaacggttctggagggagacaacatggagaccgataccatg

SEQ ID NO: 251295 - DNA, 3591 bp, synthetic construct
  misc_feature 1..3591: note = Description of Artificial Sequence: Synthetic coding sequence
  source 1..3591: mol_type = other DNA
atgctttggtgggaagaagtcgaggactgctacgagagagaggatgtccaaaaaaagaccttcacaaaatgggtaaatgctcagttctctaagttcgggaagcagcacattgagaatctgttcagtgacctccaggatgggaggaggctgttggacctgctggaggggctcaccggccaaaagctgccaaaggaaaagggatctacccgggtgcacgctctcaacaacgttaataaggcgttgcgagtgctgcaaaataataacgttgatctcgtcaacatcggcagtaccgacatcgttgacggaaatcacaagctgaccctgggtctgatctggaacataatcctgcactggcaggtcaaaaacgtgatgaagaacatcatggcaggtctgcaacagaccaattcagagaagatactgctcagctgggtcaggcagagcacccggaactatccacaggtgaatgtcatcaactttacaacatcatggtccgacggtttggcactgaacgcacttatccacagtcacagacccgacctcttcgactggaattccgttgtctgccagcagagcgcgacccagaggctggagcacgcttttaacatcgcccgctaccagttgggcatcgagaagctgctcgatcctgaagatgtggataccacataccctgataaaaagtccattctcatgtacattactagtctcttccaggtactgcctcaacaggtgagtatcgaggccatccaggaagtcgagatgctgccccgcccgccgaaagtcacaaaagaggagcactttcagctgcaccaccagatgcactattcacagcagatcacagtgtccttggctcaggggtatgagcgcaccagttcacccaaaccaagatttaagtcttacgcttatacgcaagccgcctatgtgacaacctctgatcctacacgctctccgttccctagtcagcatctcgaagcgcccgaagataaatcttttggcagtagcctcatggagtcagaagtcaacctcgaccgctatcagaccgccctggaagaagtcctcagctggctcctgagcgcggaagataccctgcaggctcagggtgagatcagcaatgatgtagaggtggtgaaggatcaattccatactcacgaggggtacatgatggatctcactgcccaccagggtagagtgggaaatattctgcagttggggagcaaacttataggaactgggaagctttccgaagatgaagaaaccgaggttcaggagcagatgaatctgctgaactctagatgggagtgcttgagagttgcaagcatggaaaagcagagcaatctgcaccgggtgctgatggacctccagaatcaaaaattgaaagaactcaacgattggctcaccaaaacagaggagcgaaccagaaaaatggaggaagagcctctgggccctgacctcgaggacctcaaaagacaggtgcagcagcataaggtgctccaggaggacttggaacaggagcaggtgcgggtcaatagtcttactcatatggtggtggtcgtagacgagagctccggcgatcatgcaactgctgccctggaggagcagcttaaggttctgggcgaccggtgggccaacatctgtagatggacagaagaccggtgggtgctgctgcaggacatacttctgaagtggcagcgcctgacagaggagcagtgtctcttcagtgcctggctttccgaaaaagaggacgccgtgaataaaatccacacaaccggctttaaggatcaaaatgagatgcttagttcactgcagaagctggcagtgctgaaagccgatctggagaagaagaagcagtcaatggggaaactctactcactgaagcaggatctgctgtctacgctgaagaacaagtcagtcacccagaaaactgaagcatggctggataactttgccaggtgctgggataatctggtccaaaagctggagaagtccacagctcaaatctcacaagcagtaacaactacacagccttccctgacacaaacgactgtgatggagaccgtgaccacagtgacaacacgggagcagattctggtgaaacatgcgcaggaagagctccctcccccacccccacagaaaaagagacagatcacagtcgacactctggaaagactgcaagaactgcaagaggccacagatgaattggacctgaagttgcgccaggccgaagtaatcaaaggctcatggcaacctgtgggagaccttcttatcgacagtcttcaggatcacctggagaaggtcaaagctctccggggagaaatagcaccactgaaggagaatgtctcccacgtgaacgacctggcccgccaattgaccaccttgggtattcagctcagcccatacaacctctccacccttgaggacctcaacactcgctggaaactgctgcaggtggccgtagaagaccgcgtaagacagctgcacgaagcgcatagagacttcggcccagctagccagcatttcctgagcacttccgtacagggcccttgggagcgggccattagtccaaataaggtgccttactacatcaatcacgagacccagactacgtgctgggatcaccctaagatgactgagctttaccaatctctggcagatctcaataacgtccgcttctccgcgtatcgcaccgctatgaagctgcgccggctgcagaaggccctgtgtctggatctgctgagtttgtccgccgcttgcgacgcgttggaccagcacaatctcaagcagaacgaccagccaatggatatcctccaaatcatcaactgcctgaccacaatttacgaccgcctggagcaggaacacaataatctggttaatgtgcctctctgcgtggacatgtgcctgaactggctgctcaatgtgtatgacacgggtagaaccggccggataagggtcctgtccttcaaaacgggcattattagtttgtgcaaggcccatttggaggacaagtaccggtatctctttaaacaggtggcatctagcaccggcttttgtgatcagagaaggctcggactgctcctgcacgacagcatccagatcccacgccagctgggagaagttgccagcttcggtgggagtaatatcgagccaagcgttaggagttgctttcagtttgcgaacaacaagccagagatcgaagctgccctgttcctggactggatgaggctggaaccccagtctatggtttggcttcctgtgctgcaccgggtggccgcagcagagactgcaaaacatcaggctaagtgcaatatctgcaaggaatgtcctatcattgggtttaggtaccgatcactcaagcatttcaactacgacatttgtcagagttgctttttttctgggcgggtagcaaaggggcacaagatgcactacccaatggtggaatattgcacgcctaccacatccggcgaagatgtgagagacttcgctaaagttcttaaaaataagtttaggacaaaacggtacttcgccaagcacccccgaatgggttacctgcctgttcagaccgttctcgagggggataacatggaaactgacacaatg

SEQ ID NO: 251296 - DNA, 3591 bp, synthetic construct
  misc_feature 1..3591: note = Description of Artificial Sequence: Synthetic coding sequence
  source 1..3591: mol_type = other DNA
atgctctggtgggaggaggtcgaggactgttacgaaagggaggacgttcagaagaaaactttcactaaatgggtgaacgcccaattcagcaagttcggcaaacagcatattgagaaccttttctccgatctccaagacggtaggagattgctcgacttgctcgaaggactgacaggccagaaactgcccaaggagaagggatcaaccagggtacatgctcttaataatgtgaacaaggcgctccgcgtgttgcagaacaacaatgtagacctggtcaacattggttccactgatatcgtagacggaaatcataagttgacactgggactcatttggaacataatcctgcactggcaggtcaagaatgtaatgaagaatatcatggctggcctccagcaaaccaatagcgaaaagattctcctgagctgggtaagacaaagtaccaggaactaccctcaagtaaacgtaattaatttcacgacaagctggtccgacggcctcgcgctcaacgctctgatccactcacacaggccagatctgtttgattggaactcagtggtctgtcagcagtccgccacccaacgcctggaacatgctttcaatatcgccaggtaccagctcggaatcgaaaagctgcttgaccccgaggatgtagatactacctaccccgacaaaaaatccattttgatgtacatcaccagcttgtttcaggtgctcccacagcaagtgtccatcgaggcaattcaggaagtcgaaatgctgccccgccccccaaaggtcacgaaggaggagcattttcaactccaccaccaaatgcactatagccagcagatcactgtaagccttgcacagggatatgagaggacgtctagcccaaagcccaggtttaagtcttatgcttatacccaggctgcatatgttactacaagcgatccaaccagatccccttttccctcccagcatctggaagcccctgaagacaagagtttcggcagcagcttgatggagtctgaagtaaatttggacagatatcagaccgctctggaagaggttctgagttggctcctgtccgctgaagataccttgcaggcccagggtgaaatctccaacgatgtggaggtcgttaaagaccagttccatacccatgaaggatacatgatggacctgaccgcccatcagggtagggtaggcaatatcttgcaactgggctccaagcttattggcaccggcaagctttcagaagatgaggagaccgaggtgcaagagcaaatgaaccttctgaactctagatgggagtgtctcagggtagcttccatggagaagcaaagcaatcttcacagagtcctgatggatctccagaatcaaaaattgaaggagctcaatgattggcttactaagactgaagagagaacgagaaagatggaggaggaacctctcggccccgatctcgaggatcttaagagacaagtccaacaacacaaggtactccaagaggacctcgaacaagagcaagtcagagtgaactcactcacgcacatggtggtagtcgtagacgaatcttctggtgaccacgccacggccgcgctggaagaacaacttaaagtacttggcgatcgctgggccaacatctgtagatggaccgaggataggtgggtactgctgcaggacatactcctgaaatggcaaagactcactgaggaacaatgtctcttttccgcttggctgtccgagaaagaggatgccgtgaataagatccacactactggattcaaagatcagaacgagatgctgtccagtctgcagaaactcgctgtgcttaaggctgacctggagaaaaagaaacagtccatgggcaagctgtacagccttaagcaagatctgctttctactctgaaaaacaagtcagtgacacaaaagacagaggcctggctcgataactttgcacgctgttgggacaatttggttcagaagcttgaaaaaagcactgcgcaaatcagtcaagctgtcaccacaacccagccatcactgacccagacaaccgttatggagacagtgactacagttaccacacgcgaacaaatattggtaaaacacgcccaggaggaattgccgccaccacctccccagaagaagcgccaaattaccgtcgacacactcgagaggctgcaggagctgcaggaggcgactgatgaattggatttgaaactgcgccaagcagaagtaatcaaaggttcttggcaacctgttggtgacctgcttattgattcactgcaggatcaccttgaaaaggttaaggccctcagaggcgaaatagcgccactgaaggagaacgtgagtcacgtgaacgaccttgccagacagttgacaacccttggaatccagttgtccccttataacctctcaacgcttgaggatctgaatacaaggtggaagctgctgcaagttgcggttgaagatagggttcgccaactgcacgaggctcatcgcgacttcggccctgcttcacagcacttcctgagcacatccgtacagggcccatgggaacgcgctatcagccccaacaaggtcccctattacataaaccacgagacacagactacttgctgggaccatcccaagatgacagaactgtaccagtccttggccgaccttaataacgtcaggttcagtgcgtacagaactgcgatgaaattgaggaggctccagaaagccttgtgtttggacttgctctcactctctgctgcttgcgacgccctcgaccagcacaacctgaagcaaaacgatcagcctatggacatcctccaaattattaactgcctgacaacgatctacgacagactggagcaagaacacaataacctcgtgaatgtgccattgtgtgtggacatgtgtctgaactggcttctgaatgtgtacgatactggaaggaccggccgcattagggtcctcagcttcaagactggaattatttctttgtgcaaggcacatctggaggataaatatagatacctgtttaaacaggtggcgagcagcacaggtttttgtgaccagaggcgccttggactgttgctgcacgattcaattcaaattccgaggcaactcggcgaggtcgcatctttcggaggttctaacatcgagccctcagtcaggtcctgtttccagttcgcgaataacaagcccgagatcgaagccgccctgtttctcgattggatgagattggaaccccagtccatggtttggcttcccgttctccatagagttgccgcggccgagactgccaagcaccaagccaagtgcaacatttgcaaggaatgtccgattatcggcttcaggtaccgcagtctgaagcactttaattatgacatctgccagtcctgttttttctctggcagggtggcgaagggccacaagatgcactacccaatggtagagtactgtactcctaccacctctggagaggacgtgcgcgacttcgccaaggtactcaaaaataaattccgcaccaagaggtattttgcaaagcatcccagaatgggctacttgcctgttcagactgtgctggaaggagacaacatggagaccgataccatg

SEQ ID NO: 251297 - DNA, 3591 bp, synthetic construct
  misc_feature 1..3591: note = Description of Artificial Sequence: Synthetic coding sequence
  source 1..3591: mol_type = other DNA
atgctgtggtgggaggaggtggaagattgttacgaaagagaagatgtgcaaaagaaaaccttcaccaagtgggtgaacgcgcaattttccaagtttggaaagcagcatattgaaaacctgttctcggatcttcaggatggaagaagattgttggacctgctggaagggctcactgggcaaaaacttcccaaagagaagggaagcacgcgtgtgcatgcactcaacaatgtgaacaaggcgctccgcgtgctgcagaacaacaacgtcgatctggtcaacattggaagcactgatattgtggatgggaatcataagctcaccctcggactcatttggaacattattcttcactggcaagtgaagaatgtgatgaagaacataatggccggacttcagcaaacgaactccgaaaagattcttctttcgtgggtgcgacagtcaactagaaactaccctcaggtcaacgtgatcaatttcactacctcgtggagcgatggactggcactcaatgcactgattcattcgcatcggcccgacctgttcgattggaactcagtggtctgccaacaatcggcaactcagagacttgaacatgcgttcaatattgccagataccaactggggatagagaagctcctcgatcccgaagatgtcgataccacttaccctgataagaagtcgattcttatgtacattacgtcactgtttcaggtgcttccgcagcaagtgtcaattgaagcaattcaagaagtggagatgctccctagaccgccaaaagtgactaaggaagaacattttcaacttcatcatcagatgcattactcacaacagatcactgtctcccttgctcaaggatacgaaagaacctcatcacctaaacctcggttcaagtcctacgcctacacccaagctgcatacgtcactacgagcgaccctaccagatcgccttttccatcacaacatctcgaggcacctgaagataaatcgtttggtagctcactgatggaatcggaggtgaatcttgatcgataccagacggcactggaagaagtgctctcctggttgttgagcgcagaggacactctgcaggcacagggtgaaattagcaacgatgttgaggtggtgaaagatcaattccatacgcacgaaggatatatgatggatttgactgcgcatcaaggcagggttggaaacattctccagctgggatctaaacttattggaactggcaaactgtcggaagatgaagagactgaggtccaagaacaaatgaacctgcttaactcgcgctgggagtgtctgcgcgttgcaagcatggaaaagcaatcaaatttgcatcgggtgcttatggacctgcaaaatcaaaagctgaaggaactgaacgactggcttactaaaaccgaggagaggaccagaaaaatggaagaagaaccactcgggcccgacttggaggacttgaagcgtcaagtgcagcaacataaggtcctccaggaagatcttgagcaagaacaagtgagagtcaattctcttacccatatggtggtggtcgtcgatgagagctccggggatcacgcaactgccgccctggaggagcaactgaaggtgctgggagatagatgggccaatatctgtcggtggactgaggacagatgggtccttctccaggatatcctccttaagtggcaacgcctcaccgaagaacaatgcctgtttagcgcctggctgtctgagaaggaagatgcagtgaacaaaatacatactaccgggtttaaggaccaaaatgagatgctttcctcgcttcagaagttggccgtgcttaaggccgaccttgagaaaaagaagcagagcatgggaaaactttattccctgaagcaagatcttttgagcaccctgaaaaacaaatcagtgacgcaaaaaactgaagcatggcttgataactttgcgaggtgctgggataatcttgtgcagaagctggaaaagtcgactgcgcaaattagccaagcagtaactaccactcagccaagccttactcaaactaccgtcatggaaacggtcacgactgtgactacccgggaacaaatccttgtcaaacatgcacaggaagaactgcctcctccacctcctcaaaagaagcgccaaatcaccgtggataccctggagcgactccaagagcttcaggaagcaaccgacgagctggatctgaagctcagacaggcggaggtcatcaaggggtcgtggcagcctgtcggcgatctgctgatcgatagcctgcaggatcatcttgaaaaagtcaaggcccttagaggtgagatagcacctcttaaagagaacgtgtcccatgtgaacgatctcgcacgccaactcactacgctcggaattcaactttccccttacaacctttcaaccctggaagatctgaacactcgctggaagctgctgcaagtggcagtggaagatagggtgagacaacttcacgaagcccatcgagactttggacccgcatcccaacattttcttagcacttccgtccaaggaccatgggaacgtgctatttcgccgaacaaagtgccttactacattaaccatgaaacgcaaaccacctgttgggatcatccaaagatgaccgagctttaccagtcccttgccgatcttaacaacgtgaggttttcagcatacagaaccgcaatgaaactgagaagattgcagaaggcactgtgtctggatctcctgtcgctttcggcagcgtgtgatgccctggatcagcataatctgaaacagaacgaccaacccatggacattctccagattatcaattgccttactactatttacgaccgtttggaacaagaacacaataaccttgtgaacgtgcctctgtgtgttgacatgtgtctgaactggctcctgaacgtgtatgatactggacgcaccggcagaatacgtgtgctgagcttcaagactgggatcatttccctctgtaaggctcaccttgaggataagtaccgctacttgttcaaacaagtggcatcatcaaccggattttgtgatcagcggaggctgggactgttgttgcacgactcgatacagatcccacggcagcttggtgaagtggccagctttggcggcagcaatattgagccttcagtcaggtcgtgttttcaatttgcaaacaacaagccggaaattgaggctgcgctgttcctggattggatgagattggagcctcaatcaatggtgtggctgcccgtccttcatagggtcgctgccgcagaaaccgcgaagcaccaagcaaagtgtaacatttgcaaagaatgtccgatcattgggtttaggtatcgaagcctgaagcactttaactacgacatttgtcagtcgtgtttcttctccgggagggtggcaaaaggacataagatgcactatcctatggtcgagtactgtactcccactacgagcggtgaagatgtgagggattttgcgaaggtccttaagaacaaatttcgcaccaagcggtacttcgccaagcacccacgcatgggctacctgccagtgcaaactgtgcttgagggcgacaacatggaaaccgataccatg

SEQ ID NO: 251298 - DNA, 3591 bp, synthetic construct
  misc_feature 1..3591: note = Description of Artificial Sequence: Synthetic coding sequence
  source 1..3591: mol_type = other DNA
atgctctggtgggaagaggtggaggactgctacgagcgggaggacgtgcagaagaagactttcaccaaatgggtaaacgcccaattttctaagttcgggaagcagcatatcgaaaacctcttctctgacctgcaggatgggcgcaggctgctggatttgctcgagggcctgacgggccagaagctgcccaaggaaaagggcagtaccagagtgcatgccttgaacaacgttaacaaagcactgagggtgctgcaaaacaacaatgtggatctggtgaacatagggtctacggacatcgtcgatgggaatcataagctgacccttggcctcatctggaacataatcctgcactggcaggttaaaaacgtgatgaaaaacatcatggcaggtctacaacagactaatagcgagaagatcctccttagctgggtgcgacagagcactcgaaactatccacaagttaatgtgatcaattttaccacctcttggagcgacggtttagcgctgaatgcattgattcactctcatcggcctgacctgttcgattggaattccgttgtctgccagcagagcgcgacgcagagactcgaacatgcctttaacattgcccggtatcagttgggaatcgagaaactcctggaccctgaagacgtagacaccacttacccggataaaaagagcatactgatgtacataactagcctcttccaagtcctgccccaacaggtgtctatcgaggcaattcaggaggtggaaatgctccctcgcccgcccaaggtgacaaaagaggagcacttccaactgcaccaccagatgcactacagccagcagattactgtgagcctggcccagggctatgaacgcactagttctcccaagccaaggtttaagtcgtatgcgtatacccaggcagcatacgtgactacatccgaccccactcggtcccctttcccatcccagcatctggaagcgccggaggacaaaagtttcgggtctagtctgatggaaagcgaagtcaacctcgacaggtaccagaccgcccttgaggaagtgctgagctggctcctgagcgccgaggatactctccaggcgcagggcgaaatcagcaatgacgtggaggtggtgaaggatcagttccacacgcacgaggggtacatgatggatctcactgcccaccagggaagggtcggcaacatcctgcagctgggttcaaagctcatcggaactggtaaactgagcgaggatgaggaaacggaggtgcaggagcaaatgaatttgctcaactcccgctgggagtgcctccgggtggcctccatggagaagcagtcgaaccttcacagagtgttaatggatctgcagaaccaaaagctgaaagaactgaacgactggctgaccaaaacagaggaacgcacgcgcaagatggaggaggagcctttgggccccgatctggaggatctaaaacgccaggtacagcagcacaaggtgctgcaagaggatttggaacaggaacaggtcagggtcaactccctcacacacatggttgtggtggttgatgaaagctccggggaccacgccacagccgcgctggaggagcagctcaaggtccttggagaccggtgggccaacatatgcagatggaccgaagaccgctgggtgctcctgcaagatatactgttgaagtggcagcggttgacagaagaacaatgtctcttttcggcatggctctctgaaaaggaagacgccgtgaacaagatccacacaacaggttttaaagatcagaatgaaatgctctcgagcctgcagaagctggcggtgctgaaagccgacctggaaaagaaaaagcagagtatgggaaaattgtattcactgaaacaagacctgctctcaacattgaagaacaagtccgtgacccagaagacagaagcctggctcgacaatttcgctcgctgttgggacaacctcgtgcagaaactggaaaagtctaccgctcagatcagccaagccgtaacaacaacgcagccatccctaacgcagactacagtcatggaaacagtcacaacagttacaacaagggagcagattctggtgaagcatgcgcaggaggagctgcctcccccccccccccaaaaaaaacgacagattaccgtggacaccttggagcgtctccaagaattgcaagaagcaaccgacgagctggacctgaaactgcggcaggcagaggtgataaaaggcagctggcagcctgtcggagatctgctgatagactctctgcaggaccacctagagaaggtcaaagcattgagaggagaaattgctcctctcaaagagaatgtttcccacgtcaatgacctcgctagacagctcactaccttaggcatccagctgtctccgtacaacctgtcgactctggaggacttgaacaccaggtggaaactgctgcaggtggcggttgaggacagggtgaggcagttacatgaggcccaccgggactttggtccggcttctcagcacttcttatccaccagcgtccaggggccttgggaacgcgccatcagcccaaataaagtcccttactatattaaccacgagacccagactacgtgttgggatcacccgaagatgacggagctgtaccagagcctggccgatctgaacaacgtccgcttttccgcctatcggaccgccatgaagctgcgtcggttgcagaaggccctgtgtctagatctcctgtcactgtcagccgcctgcgatgcactcgaccaacacaatctgaagcaaaacgaccagccaatggatattctccagatcatcaactgtctgaccactatttacgacagactagaacaagagcataataatcttgtgaatgtacccctgtgcgttgatatgtgcctcaactggctgctcaatgtgtacgatacaggcaggacaggcaggatcagggtgcttagtttcaagaccggaattatcagcctgtgcaaagctcaccttgaggataaatacagatatctgttcaaacaagtggcatcttcgacaggtttctgcgaccagaggcgcctcggcctactgctccacgactccattcagatcccccgccagctgggggaggtggcttcctttggtggatctaacatagagccctccgttcgtagctgctttcagttcgctaacaacaaacccgagatcgaggcggcgctgttccttgactggatgcgattggagcctcagagtatggtgtggctgccagtcctacacagagttgccgcagctgagaccgccaagcatcaagccaagtgcaatatctgtaaggaatgccccatcatcggattccgctaccgttccctcaaacacttcaattatgacatctgccaaagttgtttttttagcggccgggttgccaagggccacaagatgcactaccctatggtggaatattgcacccctaccaccagtggcgaggatgttcgcgacttcgccaaagtgttgaagaataaatttcgaactaaacgttattttgcgaaacacccgagaatgggctaccttcccgtgcagacagtgttggaaggtgacaatatggagacagataccatg

SEQ ID NO: 251299 - DNA, 3591 bp, synthetic construct
  misc_feature 1..3591: note = Description of Artificial Sequence: Synthetic coding sequence
  source 1..3591: mol_type = other DNA
atgttgtggtgggaggaggtcgaagattgctatgagagggaggatgttcagaagaagactttcactaagtgggtcaatgcccagttcagtaagtttggaaagcaacatatcgaaaatctcttttcagatctgcaggatgggcgcagattacttgatctgctggagggcctgactggtcagaaactgcctaaagagaaaggaagtaccagagtccacgccctgaataacgtaaacaaagccctacgggtacttcaaaataacaatgtcgatttggttaatatcgggtccactgatattgtcgatggaaaccataaactgaccctgggtctaatatggaacatcattctacattggcaggttaagaacgtgatgaaaaacatcatggcgggcctgcagcagacaaactcggagaagatcctcttgagttgggtgcgacagtctactaggaattaccctcaggtgaatgttatcaattttaccacttcttggagcgatgggcttgcactcaatgctttaatccattcgcaccgtcccgatctgttcgattggaacagcgtggtgtgccagcagagtgcgacgcagaggctcgagcatgctttcaacatcgcccgataccagctcgggatcgaaaagttactcgaccctgaggacgttgatactacctatccggacaagaaatcaatcctcatgtatataacaagtctgtttcaggtactgcctcaacaggtgtctatcgaggctatacaggaggtggaaatgctaccgaggccaccgaaagtgactaaggaagaacattttcagctgcaccatcagatgcattactcgcaacagatcactgtgtctctcgcgcaggggtatgaacgcaccagcagtcctaagcctcgcttcaaatcctatgcatatacccaagctgcctatgtgacaacctcggatcctacacggtctccatttccatctcagcacctggaagcgcccgaggacaaatcattcggcagttctctgatggagagcgaagtgaacctggaccgctatcagactgccctcgaagaagtgctgtcatggctcctaagcgcagaggacactctgcaggcccagggggaaatatctaacgacgtggaagtggtgaaggaccagtttcatacccacgaaggatatatgatggacctgacggctcaccaggggagggtgggtaatatcctacagctgggatccaagctaatagggacagggaaactgtcagaagatgaggagaccgaagtccaagaacagatgaatctgctcaatagtcgatgggagtgtcttcgcgtggcctcaatggagaagcagtcaaatttacacagagttcttatggacttacaaaaccaaaaattgaaggagctcaatgactggctgacaaaaacagaggaaagaactaggaagatggaagaagagcccctggggcccgatctagaggaccttaagcgccaggtgcagcagcacaaagtcctccaggaggacctcgagcaagagcaagtcagagtgaactctctaactcacatggtcgtggtggtggatgagtcttcaggcgatcatgccacagcagcccttgaggaacagctcaaggtgctcggcgaccgttgggccaacatctgccgatggaccgaggaccggtgggttctactccaggacattctcttaaagtggcagcgactaacagaggaacagtgtctgttttctgcatggctgagtgagaaggaggacgctgtgaacaaaatccatacaaccggattcaaggatcagaatgaaatgctgagctctctgcagaaacttgcagtcctcaaggcagacttagagaagaagaagcagagtatgggaaagctttactctctgaagcaggacctgctgagcacactaaagaacaagtccgtaacccagaagacagaggcgtggctcgacaactttgctcgctgctgggacaatctggtccagaaactggagaagtcaaccgctcaaatctcacaggccgtgacaaccacccagccgtctctgacccagacaactgttatggagactgtgacaacagtgacgaccagggagcagatcctcgtcaaacacgcgcaagaggagcttccaccacccccaccgcagaagaagcgacagatcacggtcgacaccttagaaaggttacaggagctccaggaagcaacagacgaattggatctgaaactccggcaggcagaagtgattaagggcagctggcaacctgtgggcgaccttctgattgacagcctacaggaccacctggagaaggtaaaggccctgaggggtgaaattgcgccactgaaggaaaatgtcagccacgtcaacgatctcgcccgccagcttacaaccttaggcatccagctgtccccatataacttgagtaccctggaggacctgaacaccaggtggaagttattgcaggtcgctgtagaggatagagtcaggcaactgcacgaagcacaccgggactttggccccgccagccaacacttcctgtctacctcagttcagggtccgtgggagagagccatctccccaaataaggtaccttattatattaatcacgagacccagacaacctgttgggatcaccccaagatgaccgaactgtatcaatccctggccgatctgaacaacgttcgcttctccgcctaccgcactgcgatgaagttgcggcgtctgcaaaaagcactgtgtttggacttgctttcactgtccgccgcgtgtgatgccctggaccagcacaacctgaagcagaatgaccagcctatggacattttgcaaatcatcaactgtctgaccaccatctatgacagactcgagcaggagcataataacctggtgaacgtgcccctctgtgtggacatgtgcttgaattggcttctcaacgtctacgataccggccgaacgggtcggataagggtcctctctttcaaaacaggcataatctccctgtgtaaggcacacctagaggacaaatataggtatctgttcaagcaggtggcgtcttctacaggattttgcgatcagagacggctgggattgctcctgcacgatagcattcagatacctcggcagctcggcgaagtggcgtcattcggcggttcaaacatcgagccaagtgtgcggtcctgttttcaatttgccaataataagcctgagattgaagctgctttgtttctggactggatgcgccttgaaccacagtctatggtgtggctgccggttctgcacagggttgctgcagcagagaccgctaagcatcaagccaagtgcaacatttgtaaagaatgtcctattattggcttcaggtatagatcgctgaagcacttcaattatgacatttgtcagtcttgtttcttttccggtagagttgctaaagggcataagatgcactatcctatggtagaatactgtacgcccaccacttccggcgaagatgtccgtgatttcgcgaaggtcttgaagaataagttccgaaccaagaggtacttcgctaaacacccacggatgggctatttgcctgtccagacagtcctggagggggataatatggagacggacactatg

SEQ ID NO: 251300 - DNA, 3591 bp, synthetic construct
  misc_feature 1..3591: note = Description of Artificial Sequence: Synthetic coding sequence
  source 1..3591: mol_type = other DNA
atgctgtggtgggaggaagtagaagattgctacgaacgcgaagatgtgcaaaagaaaacttttaccaaatgggtgaacgcccaattttcgaagttcggaaaacagcacatcgaaaatctcttctcggacctccaggatgggcgcagactgctggatctcctggagggactgactgggcagaagttgccgaaggaaaaggggagcaccagggtgcatgcgctcaacaacgtgaataaggctctcagggtcctgcaaaacaacaacgtcgacctggtcaacatcggatcaaccgatatcgtcgatggcaatcataaactgaccctgggacttatatggaacatcatcctgcactggcaagtgaagaatgtgatgaagaacatcatggcaggtttgcagcagactaattcggagaaaattctgctgagctgggtgagacagagcactagaaattacccacaagtcaacgtcattaactttactacgtcatggtcggacgggctcgccttgaacgcactgatccattcccacagaccagacctgttcgactggaatagcgttgtttgtcaacaatccgcgactcaaagactggagcacgccttcaacatcgcgcgctaccaacttggcatcgaaaagctgctggacccggaggatgtggacaccacctacccggacaaaaagtctatcctcatgtatattacgagcctcttccaagttttgccccagcaggtgagcatagaggcaatccaagaggtcgagatgctccctaggccacccaaagtcaccaaagaggagcacttccaactgcaccaccaaatgcattattcgcagcagatcaccgtttcactggcccaaggctacgagcgaacgagctccccaaagccgcgctttaagagctatgcctacacccaggccgcttacgtgaccacctcagacccgacccggtccccctttccatcccagcacctcgaagctccagaggataagagctttggttcaagcctgatggaatcagaggtgaacctcgaccgataccagactgccctggaggaggttctgtcctggcttctgtcagctgaagacaccttgcaagcacaaggagaaatcagcaacgacgtggaggtcgtgaaggaccagttccatactcacgaaggatatatgatggatctgactgcccatcaaggacgggtgggaaatatcctgcagcttggatccaaactgattggcactggaaaactgtcggaagacgaggaaactgaagttcaagagcagatgaatcttctcaattcgaggtgggaatgtctgcgcgtcgccagcatggaaaaacagtccaacctgcaccgcgtcttgatggacctgcagaatcaaaagctgaaagagcttaacgattggctgaccaagactgaggaacgcactaggaagatggaggaagaacctcttggacccgacctcgaggatctcaagcggcaggtgcagcagcataaggtcctgcaggaagacctggaacaagaacaggtccgcgtgaattcgttgacccacatggtggtcgtcgtggatgagtcctccggggaccatgcaaccgctgcccttgaggagcaactgaaagtccttggagacagatgggccaacatctgcaggtggactgaagatcgctgggtcctccttcaggacatcctcctcaagtggcagcgcctcactgaagagcagtgtctgttttcggcttggttgtcagagaaggaagacgccgtgaacaagatccacaccactggatttaaagaccagaacgaaatgctctcgtcgctgcagaagctggcggtgctgaaggcagatcttgaaaagaagaaacaatcgatggggaagttgtacagcctcaagcaggacctgctgtcaactctgaagaacaagtccgttactcagaaaaccgaggcgtggctggacaacttcgctcggtgctgggataacctggtgcagaagttggagaaatcgaccgctcaaatttcgcaggcggtgactaccactcaaccgtcgttgacccagaccaccgtgatggagactgtgaccaccgtcactactcgggaacagattttggttaagcacgcgcaagaggaactgcctccacctccgccgcagaagaaacgccaaataactgtcgataccttggagagactgcaagagctgcaggaagcaaccgatgagctggacctgaagttgagacaagccgaggtcatcaagggctcctggcaacctgtgggtgacctgctgatagactctctccaggaccacctcgaaaaggtgaaggccctgcgaggtgaaatcgcaccactcaaagagaatgtgtcccatgtcaacgatcttgccaggcagctgaccactttgggaatccagctgtccccgtacaacttgtccaccctggaggacctcaatacgcggtggaagctcctgcaagtggcggtcgaagatcgcgtgcgccaactccatgaagcacaccgggatttcggaccagcttctcagcactttctctcgacttccgtgcaaggtccgtgggaaagagccatttcaccaaacaaggtgccctactacatcaaccacgagactcagactacttgctgggatcaccctaagatgaccgagctgtaccagtcgctggcagacctcaacaatgtgcggttctccgcctaccggaccgcaatgaagctccggcgactccagaaggcactctgtctggacctcttgtcgctctctgcagcttgcgacgccctggaccagcataatctcaaacaaaacgaccaaccgatggacatcctgcagatcatcaactgcctcactaccatctacgatcgcttggaacaggagcacaataatctggtgaatgtgccgttgtgcgtggatatgtgcttgaactggctgctcaatgtgtacgataccggccgtacgggaaggatccgcgtcctgtcctttaagaccggcatcatcagcctctgcaaggctcacctggaggataagtatcggtacctgttcaagcaggtggcctcctcgaccggattttgcgatcagcggcggctgggactcctgctgcacgatagcatccaaattccgcggcagctcggagaagtagcctccttcggtgggtcgaatatcgagccgtccgtgcgaagctgttttcagttcgcaaacaacaagcctgaaatcgaggcagcactcttcctggactggatgcgcttggagccgcagtctatggtgtggctcccagtgttgcatcgggtggctgctgcagaaacggcgaagcatcaagctaaatgcaatatctgcaaggaatgcccgatcattggattccgctaccgctccctgaagcatttcaactacgatatctgccagagctgctttttcagtgggagagtggcgaagggacacaaaatgcattacccaatggtcgaatactgcacccctaccacctcaggtgaggatgtgagggatttcgcaaaggtccttaagaacaaattcagaaccaaacgctactttgccaagcacccgagaatgggctacctcccagtgcagacggtgctggaaggcgacaacatggaaaccgataccatg

SEQ ID NO: 251301 - DNA, 3591 bp, synthetic construct
  misc_feature 1..3591: note = Description of Artificial Sequence: Synthetic coding sequence
  source 1..3591: mol_type = other DNA
atgctgtggtgggaggaggtggaggactgctacgagcgggaagatgttcagaaaaaaacttttacaaagtgggtgaacgcacagttctccaaatttgggaaacagcacattgaaaatctgttctccgacctgcaggacggcagaagactgctggacctactggaggggcttacagggcaaaagttacccaaggagaaggggagtactcgcgtgcacgcactaaataacgtcaataaggcccttcgagtgctccagaacaacaatgtggatctcgtgaatattggatctacggacatcgttgatggaaaccataaacttacgttaggtctgatttggaatatcatactgcattggcaagtgaaaaacgtcatgaaaaacattatggctggccttcagcagacaaacagcgagaagatattgttgtcttgggttagacagagtacacgcaattacccccaggtgaatgtgatcaacttcactacgagctggagcgatgggctagcccttaacgcgctaattcattcacataggcccgatctcttcgattggaattccgtggtgtgtcaacagtccgcaactcaacggttggagcacgcatttaacattgcaaggtaccagttaggcatagaaaagctgttagacccagaggatgtcgacaccacgtaccctgacaagaaaagtatattgatgtatattacttctctttttcaggtgctccctcagcaggtgtcgattgaggccatccaggaagtggagatgctgcctcgcccacctaaagtgacaaaagaggagcacttccagctgcatcatcagatgcattattctcagcagatcacagtcagccttgcgcaggggtacgagcgtactagcagcccaaagccccggtttaagtcctatgcctatacacaagctgcatacgtaacaacgtcagacccgaccagaagcccatttccatctcagcacttagaagctcccgaggacaaaagcttcggcagctccctgatggagagtgaggtgaatctggaccgctatcagactgcactggaggaggtgctctcttggctactctcagcagaggatacactgcaagcacagggcgagataagcaatgacgtggaggtcgtgaaagaccagttccacacacatgagggctacatgatggatctgacggcgcatcagggtagagtcggcaacattctacagctggggtcgaaattaatcggtaccggaaaactctcagaggatgaggagaccgaggtgcaagaacaaatgaatctgttaaactctaggtgggaatgtctgcgcgtggcctcaatggagaagcaaagtaacttgcacagggtcctcatggatttgcagaatcaaaagttaaaggagctgaacgactggctgaccaaaaccgaggagaggactcgtaagatggaggaagaaccgctggggcccgatttggaggacctgaaacggcaggttcagcagcacaaggttttgcaggaggacttagagcaggagcaagtacgggtgaactccctcacccatatggtggtggtggtagatgagtcaagcggcgatcacgccactgctgcactcgaagagcagttaaaggtgctcggggatcgttgggccaatatttgtcgatggacagaggataggtgggtgctgttgcaggacattctgctcaagtggcagcggttgaccgaagagcagtgtctgttttctgcgtggctgtcggagaaggaagatgccgttaataagatccataccactggcttcaaagaccagaacgagatgctgtcctccctacagaagctagccgtactgaaggctgatctggaaaagaaaaaacagagcatgggtaagctgtactccctgaagcaggacctgctgtcaactctcaaaaacaaatctgtgacccagaagactgaggcgtggctggacaactttgcccggtgctgggacaatctcgtccagaagcttgaaaagtccacggcccagatatctcaggcagtgacaaccacgcagccttccctgacgcagactacggtcatggagactgtcacaactgtgaccacccgggaacagattctcgtgaagcatgctcaggaggagctcccgcctcctcctccccagaagaagcggcagatcacagtggacaccctcgagcgtctgcaagagttgcaagaggcgacagacgaacttgatctgaagctgcgccaggccgaggttattaaaggcagctggcagccagtgggggacctgttgatcgattcgcttcaggatcaccttgaaaaggtaaaggccctgcgcggagagatagctccactgaaggaaaacgtgtcccacgtaaacgatctggcccgccaattgaccacattgggtatccagctgtctccctataatctctccacgcttgaggacttgaatacacgatggaaattgttgcaagtggccgtcgaggaccgagtgcgacagttgcacgaagcccacagggactttgggcccgcctcgcagcacttcttgagcacaagcgtgcaggggccatgggagcgagctatcagccccaacaaagtaccatactacattaatcacgagacccaaactacgtgttgggaccatcccaagatgacagaactgtatcaatctttggctgacctgaataacgtgagattcagcgcataccgcaccgccatgaaattgaggagactgcagaaggctctgtgcttggacttgctctccctgagtgccgcctgcgatgccctggaccagcataaccttaagcagaatgatcaacccatggacatattgcagatcatcaactgcctgacaaccatttatgatagattggagcaggaacacaacaacctggtaaatgtcccgttatgcgttgatatgtgcttgaactggctgctaaacgtctatgacaccgggagaactggacgcatccgtgtcttgtcatttaagactggcattatttccctctgcaaagcacacctggaggataagtatcgctatttgttcaagcaggtggcgagctcaaccgggttttgtgatcaacgcagactgggcctcctgttacatgattccatccaaattcctcgccagctcggcgaggtagcttcctttggcgggagcaacatagagccatccgtcaggtcctgcttccagttcgctaacaacaaacctgagatcgaggctgccctgtttttggattggatgcgattagaacctcagagtatggtttggcttcccgttcttcatcgcgtggcagcggcagagacagcgaagcatcaagctaagtgcaatatctgtaaagagtgtccaataatcggttttcggtatcggtctcttaaacactttaattacgacatctgtcagagttgcttctttagcggaagagtcgcaaagggacacaaaatgcactacccaatggttgaatattgtaccccgactacctccggcgaagatgttagagatttcgcgaaggtccttaagaacaagtttcgcacgaaaagatattttgccaagcacccgcggatgggttacctccctgtccagacagtactagaaggggacaatatggaaacggatacaatg

SEQ ID NO: 251302 - DNA, 3591 bp, synthetic construct
  misc_feature 1..3591: note = Description of Artificial Sequence: Synthetic coding sequence
  source 1..3591: mol_type = other DNA
atgctctggtgggaagaagttgaagattgctatgaacgcgaagacgtacagaaaaagacatttacgaaatgggtcaatgcccaattcagtaagttcggaaaacaacacattgaaaatttgttttccgacctgcaggatggacgacgcttgctggatctgctggaaggtctgactgggcagaaattgccaaaagagaagggatcaacccgtgtccacgccctgaataacgtgaacaaggccctcagggtgctgcagaataacaatgtggacctggtgaacatcggaagcactgatattgtggatggcaaccacaagctgacattggggctgatatggaacattattcttcattggcaggtaaaaaatgtaatgaagaacattatggccggcctccaacaaacgaactctgagaagatcctgctctcttgggtcagacagtctactcgcaattatccccaagttaacgttattaattttacaacttcatggtctgatgggctcgctctgaatgcgcttattcattcccacagacccgacctgttcgattggaactccgttgtatgccagcagtctgcaacacagcggctagagcatgccttcaatattgctagataccagttgggaattgagaagctgctggaccccgaagacgtcgacaccacataccctgataagaaatctatcctcatgtacattacgtcactcttccaagttctaccacagcaggtgtccatcgaggcgattcaggaggtagagatgcttccacggcctcccaaggtgaccaaggaagagcactttcaactgcaccaccagatgcactattcgcagcagattacagtcagcctcgcccaggggtatgagcgcacatcaagtcccaagccacgtttcaaatcgtacgcttacacacaagctgcatacgtaacaacctctgatcctactaggagtcccttcccgtctcagcacctggaggctcctgaggataagtcatttggaagctccttgatggaatcagaagtgaacctggaccggtaccagaccgcactcgaagaggtgctcagctggctgctgagtgcagaagacacgctccaggcccagggggagatttcgaacgacgtagaggtggtaaaggatcagtttcacactcacgaaggatatatgatggatctgacagcacaccaaggccgggttggcaacatcctccagctcggcagcaagttaatagggacggggaagctcagcgaagacgaagagactgaggttcaggagcagatgaacttgttgaactcgagatgggagtgtctgcgggtcgcgagtatggagaaacaatctaatctacaccgggtgctgatggatttacagaaccagaagctcaaagaactgaatgattggttgaccaagacagaagaacgcacccggaaaatggaagaggaaccattaggcccagatctggaagaccttaagaggcaggttcagcaacacaaggtcttgcaggaggacctggaacaggagcaggtgcgtgtcaactcattgacccacatggtcgtggtggtagacgagtcttcaggagatcatgcgactgcagcactggaggagcagttgaaggtcttgggggatagatgggccaacatttgtaggtggactgaagacagatgggtcctcttacaagacatcttgctgaaatggcagagacttaccgaggaacagtgcctcttttctgcctggctgtctgagaaggaggacgcggtgaacaaaatccatacaaccggcttcaaagaccagaacgagatgctttctagcctgcagaagctggccgtgcttaaagccgacctggagaaaaaaaagcagagcatgggcaagctgtacagcttaaagcaggacttgctcagtactctgaaaaacaagagtgttacgcagaaaacggaagcgtggcttgacaattttgcccgctgctgggataatctcgttcagaagctggaaaagtctactgcccagattagtcaggcagtcaccaccactcagccttctctgacacaaacaaccgttatggaaacagtcaccacggtcacaactagggagcaaattttagttaagcacgcccaagaggaactgccacctccacccccccaaaagaagagacagatcactgttgataccctggagaggttacaggaactccaggaggcgacggacgaactcgatcttaagttacgacaggcagaggtcattaagggtagctggcagcccgtcggggatcttctcatagactctctccaggaccatctcgagaaagtgaaagccctaagaggggagatagctcctctcaaagagaatgtgtcccacgtgaacgacttggctaggcagctgacaaccctcggcatccagctctccccatacaacttgagtaccttagaggatcttaatacccggtggaagctgctgcaggtggcagtagaagatcgcgtgagacagctacacgaagcacaccgcgattttggacctgcctcacaacacttcctgagtacaagtgttcagggaccatgggagcgtgccattagtccaaataaggttccatactacattaaccatgaaactcagacaacttgttgggatcaccccaaaatgacagagctgtaccaatccctggctgatcttaacaatgtgagattctcggcttacaggacagccatgaagttgcggcgacttcagaaggcactgtgtctggatctgctgagcctctccgcggcttgcgatgccctcgatcagcacaatttgaagcagaacgatcagcccatggatattctgcagattatcaactgcctcaccactatctatgatcggctggagcaagaacataataacctggtgaacgtcccactgtgcgtggacatgtgcctgaactggttactgaatgtttacgacaccggccgaacaggaaggatacgggtcctgtcctttaaaacaggtattatatccctctgcaaggcccatctggaagacaaataccgatacttgtttaagcaggtagcaagttcaacagggttttgtgaccagagacggctgggactgctgcttcacgactcaatccagatcccgagacagctcggagaagtggctagtttcggagggtccaacattgaaccaagcgtccggtcatgtttccaatttgccaataataaaccggagatcgaagctgcactgttccttgattggatgcgactggaaccacaatccatggtgtggctcccagtgctgcaccgggtagccgccgctgaaacagcaaaacatcaggccaagtgcaatatctgcaaggagtgcccgattattggttttaggtaccgatccttgaaacactttaattacgacatctgccagagctgttttttctctgggagggtggctaagggtcacaagatgcactaccccatggtcgagtattgcacgcctactaccagtggtgaagatgtgagggatttcgcaaaagtcctgaagaataagttcaggaccaagcggtactttgctaaacaccccaggatggggtacctccccgttcagacggttctcgagggtgacaacatggagacggacactatg

SEQ ID NO: 251303 - DNA, 3591 bp, synthetic construct
  misc_feature 1..3591: note = Description of Artificial Sequence: Synthetic coding sequence
  source 1..3591: mol_type = other DNA
atgctgtggtgggaggaagtggaagactgctacgaacgggaggatgtgcagaagaagaccttcacaaagtgggtgaatgcacagttttccaagttcgggaagcaacatattgagaacctgttttccgacctgcaggatggccgtcgtttactggacttgctggagggtctcacaggccagaagcttccaaaggagaagggctctacacgcgtgcacgcactgaacaacgtgaataaggcacttagagtcctccagaataacaacgtggacctcgtcaacattgggtcaaccgatatcgtggatgggaaccacaagctgacattgggacttatctggaacataatcctgcactggcaggtcaagaatgtcatgaaaaatattatggccgggctgcagcagacaaactccgagaagatccttctaagctgggtgagacagtctaccaggaactacccccaagtgaacgtgatcaatttcactactagctggagtgatggtctagccttgaatgctctcattcatagtcatcggccagatctgttcgactggaacagcgtggtgtgtcagcagagtgctacacagcggctcgaacatgcctttaacatcgccagatatcaattaggtatcgaaaagctgttggatccagaggatgtggacaccacttaccctgataaaaaatccatccttatgtatatcactagtctgttccaggttctgccacaacaggtttctatagaggcaatacaggaggtggagatgcttcctcgcccacccaaggtgacaaaagaggagcacttccagctccaccaccagatgcactactcccaacagatcacagtttctctagcacaggggtatgagaggacaagtagccccaagccaaggttcaagtcttacgcctatactcaggcagcctatgtgactactagtgatcctactcgatcacctttcccctctcaacaccttgaggcacctgaggacaagtcttttggttctagcctgatggagtctgaggtcaatctggatcgttaccagactgcactggaagaggtcctgagttggctcctcagcgctgaagatacccttcaggcccagggtgaaattagcaacgatgtggaagtggtgaaagaccagttccacactcatgaaggctacatgatggacctcactgcccaccagggcagggtgggcaatatactacaacttggcagtaaactaataggtaccggaaaactgtctgaggatgaagagaccgaggtgcaggaacagatgaacctgttgaacagcagatgggagtgtctcagagtggctagtatggaaaaacagtccaacctacaccgagtcctgatggatctgcaaaatcagaagctgaaggagctgaacgattggttaactaaaactgaggagcggacccgcaaaatggaggaggagcctctaggccctgatttagaggatctgaagagacaggtgcagcagcataaagtcctgcaggaagacctggaacaggagcaagtccgagtgaattccctgacacacatggtggtagtcgtcgacgagagctccggcgatcacgccacagccgccctggaggagcagctaaaggttctgggggacaggtgggctaatatctgtaggtggaccgaagaccggtgggtgttgcttcaggatatactactgaagtggcaaaggttaactgaggagcagtgcctgttcagtgcatggttatctgagaaggaggatgccgtgaacaaaattcacacaacagggtttaaagaccagaacgaaatgctaagcagcctgcagaagttggccgtgctgaaagctgacctagaaaaaaaaaagcagtcaatgggtaagctgtatagcctgaaacaggaccttctgagtacactaaagaacaagtctgtgactcagaagacagaggcatggctggacaatttcgcacgctgctgggacaacctggtgcagaaactagagaaaagcaccgcccaaatttctcaggccgtgacaaccacacagccatctcttacacaaaccacagtcatggagacagttacaaccgttacaacccgagagcagatactggttaaacacgcccaggaagagctcccacccccaccccctcagaagaagaggcaaataaccgttgataccctggaaaggttacaggaactgcaggaggctacagatgaactcgacctgaagctgcgtcaggcagaggtgatcaaaggcagttggcagccagtcggggatctgttgatagacagtttacaggatcacttagagaaagtcaaagccctaagaggggagatagcaccactgaaagagaacgtgagccatgtgaacgatctggcacggcagctgacaacccttggaattcagctgtctccctacaacctgtcaaccctcgaagacctgaacactcgctggaaactccttcaggtagctgtagaggaccgggttcgtcaactgcacgaagcacaccgcgatttcggcccagcttcccagcattttctctccacctctgtgcagggtccatgggagcgggcaatatcacctaataaggtgccatactacataaatcatgaaacccagaccacctgctgggatcatcccaaaatgacagagctataccagtccctggccgacctgaataacgttcgttttagtgcttaccggaccgcaatgaagctcaggcgtctgcagaaggccctgtgcctggatctgctttctctatctgccgcctgcgacgctctggatcagcataacctcaagcagaatgatcagcctatggacattctacagattataaactgccttaccactatatacgaccgtcttgagcaggagcacaacaatctggtcaacgtcccactgtgtgtggatatgtgtctaaactggctcctgaacgtgtatgacaccggtcgcaccggacgtatacgcgtgctgtcattcaagaccggtataataagcctctgtaaagcccacctggaggacaagtacagatatctcttcaagcaggttgctagctctaccggcttctgcgaccaacgcaggctggggctgctactgcacgactccatacagatcccacgtcagcttggagaggttgccagttttggcgggagcaacatagagccctccgtacggagttgttttcagttcgccaacaataagcctgagatcgaggcagcactgttcctggactggatgagacttgaaccccagtctatggtctggctccccgtgctgcatagggtggctgccgccgagacagcaaagcaccaggctaaatgtaacatttgtaaagagtgtcctataataggatttcgctataggagcctgaagcacttcaactacgatatctgccagtcttgctttttttctggccgtgtggctaaaggacacaaaatgcactaccctatggttgaatactgcacacccaccaccagtggcgaggacgttagggactttgctaaggtgctgaagaacaagtttcgaactaaaaggtattttgctaaacacccaaggatgggatatcttcccgtacagaccgtcttggaaggagacaacatggagaccgacacaatg

SEQ ID NO: 251304 - DNA, 3591 bp, synthetic construct
  misc_feature 1..3591: note = Description of Artificial Sequence: Synthetic coding sequence
  source 1..3591: mol_type = other DNA
atgctctggtgggaggaggtcgaggactgctatgagcgtgaggatgtgcaaaagaaaacctttaccaagtgggtgaatgcacaattctcgaaatttggtaagcagcatattgaaaatctgttttcggacctccaagacggtagacgacttctcgacttactggagggcctgaccggtcagaagttgccgaaagagaaaggttcgacccgggtccacgccctaaataatgtaaataaggcgctgcgcgtcctgcagaacaacaatgtggacctggttaatatcggtagtactgacatcgtagacggtaatcacaagctcacactgggtcttatctggaacatcatcctccattggcaagtgaagaatgtgatgaaaaacataatggcgggtcttcagcaaaccaactccgaaaagattctgctgagctgggttcgccaatccactcgaaattaccctcaagttaacgtcattaacttcactaccagctggagcgatggtctggcattgaatgctttgatacattctcaccgcccagacctcttcgattggaacagcgtggtttgtcagcaaagtgccactcagcgcttggagcacgccttcaatattgcacgttatcaactgggtatcgagaagctcctggacccggaagatgttgacaccacttacccggacaagaagtccatattgatgtatattaccagcctgttccaagttttgccacagcaagttagcattgaggcgatccaggaggtggaaatgctgccacgcccaccgaaggtaacgaaggaggaacacttccaactgcaccaccagatgcattattcccagcaaatcacagtctccctggcgcaaggttacgagagaaccagcagcccaaagccccgcttcaaaagctatgcatacacgcaagcggcctacgtgaccaccagcgacccaacgcgctcaccgttcccatcccagcacctcgaagcaccggaggataaaagcttcggttcatccctcatggagagcgaggttaatctggaccgctatcaaacggcactggaagaggtcctgagctggctgctgagcgcggaggacaccctacaggcgcagggcgagatcagcaacgacgtcgaggtcgtcaaagatcagtttcatacacacgaggggtatatgatggacctgaccgcccaccaggggcgcgttggtaatatcctacaactcggaagcaaactgattgggaccggcaaactgagtgaggatgaggaaaccgaggtgcaagagcagatgaacctgctgaatagcagatgggaatgtctacgggtcgcgtccatggaaaaacagtcgaatctgcaccgggtcctcatggacctgcagaaccagaagctgaaggagctgaacgactggttgaccaagaccgaagagcgcacacgaaaaatggaggaagagccgctggggcctgatctggaggacctgaagcgccaggtccagcagcacaaagtgttgcaggaagatctggaacaagagcaagtgagggtgaatagcctgacccacatggtcgtcgtggtggacgaaagtagcggcgaccacgccaccgcggccctggaagagcaactgaaggtcctgggtgatcgctgggccaatatttgcaggtggaccgaagatcgatgggttctcctgcaggatattctgctgaaatggcagcgtctgaccgaggaacagtgcctgttttctgcttggctgtcagagaaggaagacgcagtgaacaagatacatactaccggttttaaggatcagaatgagatgttaagcagtcttcagaaactggcagtcctgaaggctgatttggagaagaagaaacaatctatgggcaaactgtactccctgaaacaagatttactgagcaccctgaagaataaatccgtcacacaaaaaaccgaagcgtggctggacaacttcgctaggtgttgggataacttggtgcagaagctggaaaagagcacggcccagattagccaggctgtgactaccactcagccttcattgacgcaaaccaccgttatggagaccgttaccaccgtcaccactcgcgaacagatcctggtaaaacatgctcaggaggagcttccaccaccacctccacagaagaagcgccagatcactgtggacactcttgagcggctgcaggagttgcaggaggccacggacgaactggatctgaagctgaggcaggccgaggtcattaagggtagctggcagccggtgggtgacctgctgattgacagtctgcaggaccacctggagaaagtcaaagccctgcgcggcgagatcgcaccactaaaggagaatgttagccacgtgaatgatttggctcgtcagcttactacgttggggattcagctgagcccttataatctcagcactttggaggacctaaacacaagatggaaactgctgcaggtcgcagtcgaggatcgcgttagacaactgcacgaagcgcatcgtgacttcgggccagcgtcacagcattttctgtctacttccgtgcaaggcccgtgggagagagccatctctccaaacaaggttccgtattacattaatcacgaaacccagacgacgtgttgggatcatccgaagatgaccgaactttaccagtcactggcggatctgaacaacgtgcgctttagcgcctaccgtactgccatgaagttgagacgcctgcagaaagcactttgtctggacctgctgagcctgtccgcagcttgtgatgcgctcgatcagcacaatctgaagcaaaacgaccaaccaatggatatcctgcaaatcattaattgtcttaccactatttacgaccgtctggaacaggaacacaataacctggttaatgtccctctatgtgttgacatgtgcctgaattggctgctgaatgtctacgacactggtcggactggccgtatccgagtgctgtcattcaagaccgggattatttctctatgtaaggcacacctggaagacaagtatcggtatctctttaagcaagttgctagcagcacgggtttctgcgatcaacgccggctgggtctgcttcttcacgattctattcagatcccgcgtcaactgggggaggtggctagcttcggcggcagcaacatagagccgagcgtgcggtcctgtttccagtttgcgaataataagccagagatcgaggctgcactcttcttggattggatgcgcttagagccgcagtccatggtgtggctgcctgttctgcatcgcgtggcagccgctgaaacggcgaaacaccaggccaaatgtaacatctgcaaggagtgtccaattatcggatttcgttaccgctcattgaagcattttaactacgacatctgtcaatcttgtttctttagcggtcgggtcgcaaagggtcataagatgcactatccaatggtggagtactgcactccaacgaccagcggagaagacgttagagattttgcaaaggtactgaagaataaatttcgcactaaacgctacttcgccaagcacccacggatggggtatttacccgttcagacggtcctggaaggcgataacatggagaccgatacgatg

SEQ ID NO: 251305 - DNA, 3591 bp, synthetic construct
  misc_feature 1..3591: note = Description of Artificial Sequence: Synthetic coding sequence
  source 1..3591: mol_type = other DNA
atgctgtggtgggaagaggtggaggattgctatgaacgggaggacgtgcagaagaaaaccttcactaagtgggtcaacgcacaattctcgaagtttgggaaacagcatatagaaaaccttttctccgatcttcaagatggtcggagacttctggatttacttgaagggctcaccggacagaaacttcccaaggagaagggatccacaagagtccacgccttaaacaacgttaataaagctctgagggtgttacagaacaacaatgttgatttggtgaacatcggttccacagacatagtggatgggaatcataaactgacactgggtctgatttggaatataatactacattggcaggtgaagaacgtgatgaaaaatattatggcaggactccaacagacaaatagtgaaaagattctcctcagctgggtacgccagtccactagaaactatccccaggtcaacgtgatcaatttcaccacctcctggtccgatggactggccctaaacgcgctgattcactctcatcgaccggatttatttgattggaactcggtcgtttgtcagcagtcagccactcaaaggctcgagcacgcattcaatatagctcgctatcaactgggaatcgaaaaactcctcgacccagaggatgtagacaccacctacccagacaaaaagtccattctgatgtatattacaagtttgtttcaggtgctgccacagcaggtaagtatagaggcaatccaggaagtagagatgttgccacgccccccaaaggtcacgaaagaggagcacttccagttgcatcaccaaatgcactacagccaacagataactgtttcacttgcacaaggatatgagagaacctcttccccaaaacctcgctttaagtcctatgcgtacacacaagcagcttatgtcactaccagcgatcccacccgatctccttttccatcgcagcatctcgaagccccagaagacaagtctttcggatcgtcattaatggagtccgaagtgaatttggaccgttatcaaactgctctggaagaagttctgtcgtggctattgtcagctgaagatactctacaagctcagggggaaatctccaatgatgtggaggtggtcaaagaccagtttcacacccacgaaggctatatgatggatttgaccgctcaccagggccgggttggtaatatcctgcagctcgggtccaaattgattggcacagggaaactgtctgaagatgaggagacggaggttcaggaacagatgaacctcctgaacagtagatgggagtgcctcagggtagcatcaatggagaagcagagcaacctgcaccgtgtcctgatggatctgcagaaccagaagctgaaagagttgaatgattggttgaccaaaactgaagaaaggactcgcaagatggaagaagagccactggggccagatctcgaagacttaaagcggcaggtgcagcagcacaaagtgttgcaggaagatctggagcaggaacaagtccgtgtaaacagcttaacccacatggttgtcgtagttgacgagtcctccggtgaccacgctacagctgccctggaggaacagctgaaggtgttgggagatcggtgggcaaatatatgcaggtggacggaagatcgctgggtactgctccaggacattctcctgaagtggcagagattaactgaggaacagtgtctcttctcagcctggctgtcagaaaaagaggacgctgtgaataaaattcatactacaggctttaaagatcagaatgagatgctgtcgtccctgcagaagcttgccgtgctgaaggcggacttggagaagaagaaacaaagcatgggcaagttgtattccttgaagcaggacctgctgtctactttgaaaaataaatcagtgacgcagaaaactgaagcgtggctcgataacttcgctaggtgttgggacaatctggtgcagaaactcgaaaagtctactgcccagataagccaagctgtcactacgacacagccctctctgacccagacaaccgttatggaaaccgttaccacagtcactactcgagaacaaattctcgtgaagcatgcacaggaggagcttccgccgcccccaccccagaaaaagcgccagataaccgtagacaccttagaacgactgcaagaactgcaggaggcaacagatgaattggacctgaagctccgacaagccgaagtgatcaaaggcagctggcaacctgtgggcgatttacttatcgattctctgcaggatcatctggagaaggtgaaggccctccgcggcgagatcgctcctcttaaggaaaatgtaagccatgtgaatgatctggcccgccagcttacaactctgggtatccaactctctccttataatctatctaccctcgaggacttaaatactagatggaaacttctgcaagttgcggtggaagaccgagtgcgtcagttgcacgaagcacatagggattttggacccgcctcccagcacttcttgtccactagtgtgcaggggccgtgggagcgtgcaatcagtccgaataaagtgccctactacatcaaccacgagactcagacaacatgctgggaccaccccaagatgaccgaactataccagtcactggcagatttaaacaatgtcaggttttccgcatatcgaactgctatgaagctgagacgcctacagaaggccctgtgtctcgatttactaagtctcagcgcggcttgcgatgccctggaccagcacaacctaaaacagaacgatcagccaatggacatactacagattattaactgcttaaccaccatctacgacagactggaacaggagcataacaacttggtgaacgtgcccctgtgcgtggatatgtgcttgaactggctgctaaatgtgtacgacacagggagaaccggcagaatccgcgttttgtcattcaaaacaggtattatctccctttgtaaagcccacctagaggacaagtatcggtacctgttcaagcaagtggcatcttcaaccggcttttgcgaccagcggcgcctgggtctgctactgcacgattccatccagatccctagacaattgggcgaggtggcttcatttggcggatcaaatattgagccgagtgtgcggagctgtttccagttcgctaacaacaagcccgagatcgaggccgctctgttcttggattggatgagattggaaccccagtcaatggtgtggctaccagtactgcatcgggtcgccgccgcagagacagctaagcatcaggctaagtgcaatatctgcaaggaatgtccgattattgggtttcggtaccggtccctgaagcattttaattacgacatttgccagagctgctttttttcaggcagggtggccaaaggccacaaaatgcactatcccatggtggagtactgtacaccaacaaccagcggcgaagatgtccgcgacttcgccaaggtgctgaagaataaattcaggactaagcgctattttgccaaacacccccgaatgggatacctccctgttcaaacggtgcttgagggcgataatatggaaaccgataccatg

SEQ ID NO: 251306 - DNA, 3591 bp, synthetic construct
  misc_feature 1..3591: note = Description of Artificial Sequence: Synthetic coding sequence
  source 1..3591: mol_type = other DNA
atgctttggtgggaagaagtcgaagattgttacgaacgtgaggatgtccaaaagaaaacttttactaagtgggtgaacgcgcagttttcgaaattcggcaagcaacatatcgaaaatctgttctcggaccttcaagacgggaggaggcttctggatctgcttgaaggactgaccggtcaaaaactgccaaaggaaaagggaagcacccgtgtgcatgcattgaacaacgtcaataaggctctgagagtcctccagaacaataatgtggatctggtgaatatcggaagcaccgacatcgtggacggaaaccataagttgactcttggactgatatggaacattatactgcattggcaagtcaagaacgtgatgaagaacatcatggctggcctgcagcaaaccaactcggaaaagatactgcttagctgggtgaggcaatcaacccgcaactaccctcaagtgaacgtgattaacttcactacctcatggtccgatggacttgcgcttaacgccctgattcactcacaccgtccagatctctttgattggaacagcgtggtgtgtcaacaatccgctactcagagattggagcatgctttcaatatcgcccggtaccagctgggaattgaaaagctgctcgatcctgaagatgtcgacaccacttacccggacaaaaagtccatactgatgtacattactagcctgttccaagtactgccccagcaagtctcgattgaagcaattcaggaagtcgagatgctgccccgcccacctaaagttacgaaagaggagcattttcaacttcaccaccagatgcattactctcaacaaatcacggtgagcctcgcacagggttacgagagaacttcaagcccgaagccccggtttaagtcgtacgcgtacactcaggcagcgtacgtgactacttccgatccgaccaggtccccattcccgagccaacatctcgaagcaccagaggacaaatcgttcggatcgtccctgatggaatccgaggtgaacttggatcggtaccaaacggcactggaggaagtgcttagctggctgctcagcgcggaagatactcttcaggcacaaggagaaatctccaacgacgtggaagtggtcaaagatcaatttcacacccacgaagggtacatgatggatcttaccgctcaccaaggccgggtgggaaacattttgcaattggggtcaaagctgattggaactggaaaactctccgaagatgaagagacggaagtccaagaacagatgaatctgctcaactcgcgctgggaatgtcttagagtggcatccatggagaagcagtccaacctgcaccgggtccttatggatcttcagaaccagaaattgaaggagctgaatgattggctcactaaaactgaagaacggacgcggaaaatggaggaagaacctctcgggccggatctggaagatctgaagcgacaagtccagcaacataaagtgttgcaagaggatctcgagcaagagcaggtgcgggtcaactccctgacccatatggtggtcgtcgttgatgaatcctcgggtgaccatgcaacggcagcactggaagagcagctcaaggtgttgggcgacaggtgggccaacatttgccggtggaccgaggaccgctgggttttgctgcaagatattcttttgaagtggcaacggcttacggaagaacagtgtctgttctcggcatggcttagcgagaaggaagatgcagtcaataagattcacactaccggctttaaggatcaaaatgaaatgctttcctctcttcaaaagctggcggtcctgaaggccgatctcgagaagaaaaaacaatcgatgggcaagctgtactcccttaaacaagaccttctgagcaccctgaagaataagtcggtgacccagaaaactgaagcctggcttgataactttgcaagatgttgggataacctggttcagaagctggagaaatccacggcacagatctcccaagcggtcacgactacccaaccatcccttactcagacgactgtgatggaaacggtaaccaccgtaactacccgggagcaaattctcgtgaagcatgcccaagaagaactccctcctcctccgccacaaaagaagaggcagatcaccgtggacaccctggaacggctgcaggaactccaagaggcaaccgacgaacttgacctgaaactgaggcaggccgaagtgatcaaaggatcgtggcagccagtgggtgatttgcttatagattcactgcaagaccaccttgagaaggtcaaggcactgcgtggggaaatagcaccactgaaagagaatgtgtcccatgtgaatgaccttgcgagacagctcactactcttgggattcagctctcaccatacaatctttcgaccttggaagatcttaatacgaggtggaagctcctccaagtggcagtggaagatcgcgtccgccaactgcatgaagcacatcgcgactttggcccagcttcgcaacactttctgtctacttccgtgcagggaccatgggaacgtgcaattagccctaacaaggtcccttactatatcaaccatgagactcagactacttgctgggatcatccaaaaatgacggagctgtaccagtccctggcagatctgaacaatgtgcgattttccgcctatcgcaccgccatgaagctgagaaggcttcaaaaggcactgtgtctggaccttctctcactctcggcagcgtgcgacgccctcgaccaacacaacctgaagcagaatgaccaaccaatggacattctccagattatcaactgccttaccaccatttacgatcgccttgaacaagaacacaacaacttggtgaacgtgcctctctgtgttgatatgtgcctcaactggcttctgaacgtgtacgataccggtcggactggaagaattcgtgtcctgtctttcaagaccgggatcattagtctttgtaaggcacatctggaagataagtacagatacctgttcaagcaagtggcaagctccacgggcttttgcgatcaacggcgacttgggctccttctccatgacagcattcagattcctagacagcttggtgaagtcgcttcgttcggaggtagcaacatagaacccagcgtgcggagctgctttcagttcgccaacaacaagcctgaaatcgaggcagcactttttctggattggatgcgccttgaacctcaatcgatggtgtggctcccagtgcttcatagagtcgcagccgcagaaaccgcaaaacatcaagccaagtgtaacatctgtaaagagtgccctattatcggtttcagatacagaagccttaaacatttcaattatgatatttgtcaatcatgctttttcagtggcagagtggcaaagggacataagatgcactaccctatggtagaatattgcaccccaactacctcgggtgaggacgtgcgggattttgcaaaggtgctgaaaaacaagtttagaaccaaaagatacttcgctaagcatccccggatggggtacctgcctgtccagaccgtgcttgaaggggataacatggaaactgacaccatg

SEQ ID NO: 251307 - DNA, 3591 bp, synthetic construct
  misc_feature 1..3591: note = Description of Artificial Sequence: Synthetic coding sequence
  source 1..3591: mol_type = other DNA
atgttatggtgggaggaagtggaggattgttacgagcgggaagacgttcaaaaaaagacctttactaagtgggtgaatgcccaattttccaagtttgggaagcagcacatcgaaaatttattctcggacctccaggatggaaggcgcctgttagacctccttgagggtttgacagggcaaaagctgccaaaggaaaagggctctactagggtgcatgctctgaataatgttaataaggcactgcgcgtgcttcaaaacaacaatgttgatctggtaaatattgggtccacggatatcgttgatggtaaccataagttgacactcggtctgatatggaacataatcctgcactggcaagtgaagaacgttatgaagaacattatggctggattgcagcagaccaacagtgaaaaaattttgttgagctgggttaggcagagcaccaggaattacccgcaggtaaatgttatcaatttcaccactagctggtcagacggactcgcgttaaacgccctgattcatagtcatagaccagatctatttgattggaatagcgtggtctgccagcaatctgccacacaaaggttggaacacgctttcaacatcgcacgctatcagctcggtatcgaaaagttgctggaccctgaggacgtggatacaacctatccagacaagaaaagtattttaatgtacatcacatcactgttccaggtcctgccacagcaggttagtatagaggcgattcaagaggtggaaatgctcccccgaccaccaaaggttacaaaggaggagcatttccaactgcatcatcagatgcactattcacagcagatcacagtttcactagcccagggatacgagcgtacctcctctccaaagccgcggtttaaatcatacgcctatacacaggccgcctacgtgaccacttccgatccgacccgctctcctttcccctcccagcatctcgaagcaccagaggataagtcttttggttcctctctgatggaaagcgaggtcaatcttgataggtaccagaccgccttggaagaggtcttatcgtggctcctttcagccgaggatactctgcaggcccagggggaaatctccaatgacgtcgaggtagtgaaagaccagtttcacacccatgagggatacatgatggacctgactgcccatcaaggccgcgtgggtaacattctacaactcgggagcaagctgatcggcactgggaagctgtccgaggacgaggagaccgaggtacaggagcaaatgaacttattgaactcaagatgggaatgcttaagggtagcatccatggagaagcagagtaacctgcaccgggtgttgatggatctgcagaaccagaagttgaaagagcttaacgattggcttaccaaaactgaggaacggacacgcaaaatggaggaggaaccactcgggccagatctggaggatctcaagaggcaggtccagcagcataaggtcctccaggaagatctcgagcaggagcaggttcgcgtgaactctctcacccatatggtggtcgttgtcgatgagtcaagtggggaccacgccacggcggcattggaagagcagctcaaagtactaggggatcggtgggccaatatctgccgctggaccgaggaccgctgggtattgctgcaggacatcctcctcaagtggcagcgcttgaccgaggagcagtgtctattctcagcatggctgtccgagaaggaagatgccgtgaataagattcacaccacagggtttaaggatcaaaatgaaatgcttagctctttgcagaagttagctgtcctaaaagctgacctggagaaaaagaagcagtctatgggtaaattatattctttgaagcaggacttactctccacgttaaaaaacaagtctgtgacgcagaagacagaagcttggctggataacttcgcccgttgctgggataacctcgttcagaaactagagaaatcgactgctcagatcagccaagcagttacgactacgcagccttccctgacccagactacagtcatggagactgtgaccaccgtcaccaccagggaacaaattcttgtgaagcatgcacaggaagaattacccccgccgcccccccagaaaaaaaggcagattaccgtagacacattagaacgtctccaggaactgcaagaggctactgatgagttggacctaaagttaaggcaggcagaggtgataaagggcagttggcagccggtgggcgacctgctcattgattctctgcaggaccacctcgagaaggtcaaggctctccggggtgaaattgcgccactgaaagagaacgtatcccacgtgaacgacctggcgaggcagctgactactcttggcatccagctcagcccctataacctgtccacactcgaggatctgaatactagatggaaactgttgcaggtagccgtggaagatcgagtgcgtcagctacacgaagcccaccgggatttcggccccgcctctcagcacttcttatcaacctctgtgcaaggaccctgggagagagctatatcgcctaacaaggtgccttactacatcaatcatgaaacccagactacatgctgggatcatccgaagatgacagaattgtaccagtccttggccgacctgaacaatgtgaggtttagcgcctacagaaccgccatgaaactgaggcgcctgcagaaggctttgtgtctagatctgctttcactctctgccgcctgcgatgctctagaccagcataacctcaaacagaatgatcagcccatggacatcctgcagatcattaactgcctgacaacaatctacgatagactggaacaggaacacaataatctggtgaatgttcccctgtgtgtcgatatgtgtctgaactggcttcttaacgtgtatgataccggccggactggaagaatccgcgtgctgtccttcaaaactggcataatctctctgtgcaaagcacatctggaagacaaataccggtacttgttcaaacaggtggccagctccactggtttttgtgaccaacgccggctcggcctgctgttacacgacagtatccagattcctaggcagctcggcgaggtggccagttttggaggcagtaacattgagccatctgtcagaagctgcttccagtttgccaacaacaagcccgagattgaggcagcactcttcttagattggatgcgcctcgaaccccaaagcatggtctggctgcccgttctgcatagggtggcagctgcagaaaccgcaaagcaccaggccaaatgtaacatttgcaaggagtgccctattattggcttccggtatcggagtctgaaacacttcaattatgatatatgccaaagttgctttttctccggccgggttgcgaaaggacataaaatgcactacccaatggtcgaatactgcacccccactacatccggtgaagatgtgcgagacttcgccaaagtgctgaagaataagtttagaacaaaaaggtacttcgctaaacatcccaggatgggctacttgcccgtccagactgtgctcgagggcgacaatatggaaactgatacgatg

SEQ ID NO: 251308 - DNA, 3591 bp, synthetic construct
  misc_feature 1..3591: note = Description of Artificial Sequence: Synthetic coding sequence
  source 1..3591: mol_type = other DNA
atgctgtggtgggaggaggtcgaggactgctacgaaagggaggacgtgcagaagaaaaccttcactaagtgggtgaacgcgcaattctccaagttcggtaaacaacacatcgaaaacttgttcagcgacctgcaggatggaaggcgcctccttgatctgcttgaaggactcactggacaaaagctcccaaaagaaaagggttccactcgcgttcatgccctgaacaacgtgaacaaagcgttgcgagtgttgcagaacaacaatgtggacctggtgaacattggatccaccgacatcgtagatggcaatcataagctgaccctgggactgatttggaatatcatcctgcactggcaggtgaagaacgtgatgaagaacataatggccggactgcagcaaactaattctgagaagattctgctgagctgggtccggcaatccaccagaaactacccacaggtcaatgttatcaacttcaccaccagctggtctgatggcctcgccctgaacgctcttatccactcacaccgcccagatctcttcgactggaactcagtggtctgccagcaatccgccacccagagacttgagcatgcattcaatatcgcccggtatcagctgggcatagaaaagctgttggacccggaggacgtggacactacgtacccagacaagaagtccattttgatgtacataacctccctgttccaggtgctccctcagcaagtgtccatcgaagcaatccaggaggttgagatgctgccgcgcccacctaaggttactaaagaagaacatttccaactgcatcatcagatgcattatagccaacagatcaccgtgagcctggcccaaggatacgaacggaccagcagtccaaagccgcgctttaagtcgtacgcttatactcaggccgcctacgtgactactagcgacccaactagatccccttttccatcccagcacctggaggccccagaggacaagagctttggttcatcgctgatggaatcggaagtgaacctggatcggtaccaaaccgccctggaggaggtgctctcatggctgctttccgccgaagatacgctgcaggctcagggagaaatctccaacgacgtggaagtagtgaaagaccagttccacactcatgaagggtacatgatggacctgactgcccatcaagggcgggtcgggaacatcctgcagctcggaagcaaacttatcgggactggaaagctgagcgaggacgaggagactgaggtgcaagaacagatgaacctcctgaactcccgatgggagtgcctgagggtggcctcaatggagaagcagtccaatctgcaccgcgtcctcatggatctgcaaaaccaaaagctgaaagaactgaatgattggctgaccaagacggaagagagaactaggaagatggaagaggagccgttgggacctgatctcgaagatctgaaacggcaagtgcagcagcacaaggtcctgcaggaagatttggaacaagaacaggtgcgcgtgaactcacttacccatatggtggtcgtggtcgacgagtcgtcgggggatcatgccactgccgcccttgaagaacaactgaaagtactcggcgaccgctgggctaatatctgcagatggaccgaggaccggtgggtgctcttgcaggacatcctgctgaagtggcaaagactgaccgaagagcaatgccttttttcggcctggctgtcagagaaggaagatgcggtgaacaagattcacactaccgggttcaaagaccaaaatgaaatgctctcctccttgcaaaaactggctgtcctgaaggcggacctggagaaaaagaaacaatcaatgggtaaactctactctctgaaacaagatctgttgtcgaccctgaaaaacaaaagcgtcacccaaaagacggaagcctggctcgataactttgctcggtgttgggataatctggtgcagaaactcgaaaagtccactgctcaaatttcacaagcggtgacgacgacccaaccgtcactgactcagactaccgtcatggaaaccgtcaccaccgtgaccacgcgggagcaaattctggtcaagcacgcgcaggaggaactcccgccaccacctccacagaagaagaggcagattacggttgatactctggagagactccaggagctccaggaagccaccgacgagctggaccttaagttgagacaagcggaggtgatcaaaggctcatggcagccagtgggagatctcctgattgactcgctccaggatcatctcgagaaggtgaaggcgctgcggggtgaaattgcaccgctcaaagagaacgtttcccacgtgaatgatctcgctagacaacttactaccctcggcatccaattgtcgccctacaacctctccactctcgaggatttgaacactcgctggaagctgctgcaggtcgcggtcgaagatcgggtgcggcagcttcacgaagcgcaccgtgacttcggaccagcaagccagcactttctctcgacttcggtgcagggaccgtgggaaagggcaatctcacctaacaaagtcccctactatatcaaccatgaaacgcagactacctgctgggaccatcctaagatgactgagttgtaccaatctctggccgacctgaataacgtgcggttttccgcctataggaccgctatgaagctgcggcggctgcagaaggcactgtgtctggacctgctgtcactgtcagcggcatgcgacgcgctcgaccaacacaacctcaagcaaaacgaccagccgatggatatcctgcagatcatcaactgcctgactaccatctacgaccgcctggagcaggaacacaataacttggtcaatgtgccgctgtgcgtggacatgtgcctcaattggctgctcaacgtgtacgacacgggcagaaccgggcggatcagagtgctttcgttcaagactggaatcatctccttgtgcaaggcgcaccttgaggacaagtacagatacctctttaagcaggttgctagcagcaccggattctgtgaccagaggcgtctcggccttctcttgcacgactcaatccagatcccgcgccagctgggagaggtcgccagcttcggaggaagcaatatcgaaccttcagtgaggtcgtgtttccaattcgcaaataacaagccggagatcgaagccgcacttttcctcgattggatgcggctggagccacagtctatggtctggctcccggtactgcaccgggtggctgcagccgaaaccgctaagcatcaggcgaagtgcaacatctgtaaagaatgcccgatcatcggattccgttaccggtcgcttaagcacttcaactacgacatttgccagtcctgcttcttctcagggcgggtggccaagggacacaagatgcactacccgatggtggaatactgcactcccactactagtggagaggacgtgcgcgacttcgctaaggtcctgaagaataagttccgcaccaagagatacttcgccaagcatccgcgcatgggttacttgccggtccagaccgtgctggaaggagacaatatggaaaccgataccatg

SEQ ID NO: 251309 - DNA, 3591 bp, synthetic construct
  misc_feature 1..3591: note = Description of Artificial Sequence: Synthetic coding sequence
  source 1..3591: mol_type = other DNA
atgctgtggtgggaggaagtcgaggattgttatgagcgggaagacgtccagaaaaagacgtttacaaagtgggttaacgctcaattttccaagtttgggaaacagcacatcgagaatctgtttagtgacttgcaggacggccgtaggctcctggacttactggaggggctcaccggacagaagctgccaaaagaaaagggttctactagggtccacgcgctgaacaacgtgaataaggctcttagagtgctgcagaataataacgtggacctcgtgaatattgggagcaccgatatagttgacggaaaccataaattgacattgggacttatctggaacattatcctgcattggcaggttaagaacgtcatgaagaacatcatggcaggccttcagcagaccaactctgaaaagatcttgctgagttgggtgaggcagtcgactcgcaactatccgcaggttaatgtcattaacttcacaacctcttggtccgatgggttggcactgaatgcccttatccattcccatcggcccgatctctttgactggaatagcgtggtctgtcagcagagcgccacgcaacgcctggaacacgcattcaatatcgccagataccagctaggcatcgagaaactcctagatcctgaagacgtcgacaccacatatcccgacaagaaaagtatcttgatgtatatcacaagcctgtttcaggtgctgccccagcaggtgtctatcgaagccatccaggaagtggaaatgttaccgcggcccccaaaggtgaccaaggaagagcatttccagctgcaccatcaaatgcattactctcagcagattaccgtcagtctggcacagggctatgaaagaaccagctcaccaaaacctcgcttcaagagctatgcttatacccaggctgcctatgtgacaacctctgaccccacccggtctccctttccttcgcagcatctcgaagcaccagaggacaagtcgtttgggtcttctctcatggagagcgaagttaacctggacagatatcagaccgcactggaggaggttttatcttggctcttgtccgccgaagacaccctccaggctcaaggagaaatttccaacgacgtcgaagtggtgaaggaccagttccacacacatgaaggttacatgatggatcttacggcccatcagggtcgcgtgggaaatatcctgcagttggggagcaaactgattggcaccgggaaactcagtgaagatgaggagaccgaagttcaggagcaaatgaatcttctcaattccaggtgggaatgtctgagggtcgccagtatggaaaagcaatcaaatttgcaccgcgtgctcatggatttgcagaaccagaagctgaaagaattgaacgattggttaacaaagacagaggagcgaacccggaagatggaggaggagcccctcggcccagatttggaggacctgaaacgccaggtacagcagcacaaggtgctacaagaggacctggagcaggagcaagtcagagtcaattcccttacccatatggtagtcgttgtggatgagtctagtggggaccacgcaacagcagctctggaggaacagctgaaagtgctaggggacaggtgggccaatatttgtaggtggaccgaggaccggtgggtgctgctacaggatatactgctcaagtggcagcgattgaccgaggaacaatgcctattctccgcatggctttcagagaaagaggatgccgtcaacaagatccataccactgggtttaaagatcagaatgagatgctgtcatccctccaaaaactggccgttttaaaggcggatctggagaagaagaagcaaagtatgggaaaactgtattctctgaagcaggacttgctttccaccctcaaaaacaagtcagtgactcagaagacagaggcctggctcgataacttcgctcgttgctgggataacttggttcagaagcttgagaaatcaactgcacagattagtcaagcagtgaccactacccagcccagcttgactcagacgaccgtgatggagacagtaacaacggtaacaactcgtgaacagatattagtgaagcatgctcaggaggaattacctcctccacctcctcaaaaaaaaaggcaaatcactgtggacaccttggagaggttgcaggagctccaggaggcgacggatgagctagacctgaaactcagacaagcggaggtgattaagggtagctggcagcctgtgggcgacctgctgatcgactcacttcaggaccacctggagaaggtcaaggctctccggggcgaaatcgctcccctgaaagagaacgtctcgcatgtgaatgacctggcgcggcaactgacaacactcggcatccagttgtccccatacaacctgagcaccctggaggatctgaatactcgttggaagctactacaggtcgctgttgaggatagggtgaggcaacttcacgaggcccaccgcgacttcggccctgcttcccagcatttcctgtccacaagcgtccagggcccctgggaaagagccatttctcctaacaaagtaccttactatataaatcacgaaactcagaccacgtgttgggatcaccctaaaatgaccgaactgtaccaaagcttagccgacctgaataatgttcgattcagcgcttacagaacagctatgaagcttagaaggcttcagaaagctctgtgtctcgatctgctctctctgtcagcggcgtgcgacgctctggaccagcataaccttaagcagaacgatcagcctatggatattcttcagatcatcaactgcctgacgacaatctatgacagactcgagcaggagcacaataacctggtgaatgtgcctctctgtgtcgacatgtgtttgaactggctgctgaacgtgtacgacaccggacgaacagggcgcatacgcgtcctctccttcaagacaggcatcatcagcctgtgcaaggcacacctcgaggataagtatagatatctgtttaagcaggtcgcttctagtactggtttttgtgatcagagaaggctaggccttctgcttcacgatagtatccaaatccctaggcagctaggagaagtggcgtcctttggcggaagtaatattgagccctcagtgcgctcttgcttccaatttgccaataacaaaccagaaatagaagctgcactattcctggattggatgagactcgaaccacagtccatggtgtggctgccggtgctgcatagggtagcagctgctgagacggccaaacaccaggcaaagtgtaacatttgtaaagaatgtccaataatagggttccggtatcgctctcttaagcactttaactatgatatatgtcagtcctgcttcttctccggaagagtggccaaagggcataagatgcattaccctatggtcgagtactgtacacctaccacctccggggaggatgtgcgggactttgctaaggtcctgaagaacaaatttagaaccaagagatactttgctaagcaccctaggatggggtatctcccagtccagacagtgctggagggcgataatatggaaactgatacaatg

SEQ ID NO: 251310 - DNA, 3591 bp, synthetic construct
  misc_feature 1..3591: note = Description of Artificial Sequence: Synthetic coding sequence
  source 1..3591: mol_type = other DNA
atgttgtggtgggaagaggtggaagattgctacgaaagagaagatgtgcaaaagaaaacctttactaagtgggtgaacgcgcagttctccaaattcggaaagcagcacattgagaacctcttcagcgacctccaggacggccggcgcttgttggacctccttgagggactgactggccagaaactgccaaaagaaaaggggtcgacccgggtgcacgcgctgaataatgtgaataaggcgctccgggtgttgcagaacaataatgtggacctcgtcaatatcggcagcaccgacatcgtggacggaaatcataagttgacccttggactcatctggaacataatcctccattggcaggtgaaaaacgtcatgaaaaacatcatggcggggctgcaacagactaatagcgaaaagatcttgctgtcctgggtgcggcaaagcaccaggaactacccacaggtgaatgtgattaacttcacgacctcatggtcagacgggctcgcccttaacgccctcatccacagccaccgccctgacttgttcgactggaactccgtcgtgtgtcagcaatcagccacccaacggctcgagcacgcgtttaacattgcccggtaccaactgggaattgagaagttgctcgacccggaggacgtggatacgacctacccggataagaagtccatactgatgtatatcacgtcactgttccaggtgctgccgcaacaagtgtcgatcgaagccattcaagaagtggaaatgctcccgcgccctcctaaggtcaccaaagaggaacacttccaactccatcaccaaatgcactactcacagcagatcaccgtctcgctggcgcagggatacgaacgcacctcatcgccaaagccaaggttcaagagctacgcgtacacccaggccgcttacgtgactacttccgacccaactcggtcccccttcccatcacaacacttggaggccccggaagataagtcgtttggctcttcgctcatggaatcagaggtgaacctggaccgctaccagaccgccctggaggaggtcctgtcctggctcttgtccgccgaggataccctgcaagcacagggtgaaatatccaacgatgtggaagtggtgaaagaccagtttcatactcacgaaggttacatgatggacctcaccgcacaccagggacgcgtggggaacatcctgcagctcggatccaaactgatcggaaccggcaagctctcggaggacgaagaaactgaagttcaggagcaaatgaatctcctcaacagccggtgggaatgcctcagggtcgcatccatggaaaagcagtctaatttgcacagagtcttgatggatctccagaaccagaagctcaaagaactgaatgattggcttaccaagacggaggaaagaactcggaagatggaggaagaacccctgggacctgatctggaggacctcaaacgccaagtgcagcagcataaggtgctccaggaggatcttgaacaagaacaggtgcgggtgaattcactgacccatatggtcgtggtcgttgacgagtcgtcgggtgaccatgccactgcagctctggaagagcagctcaaggtgctcggcgatcggtgggctaacatttgtagatggactgaggaccggtgggtgcttctgcaggacattctgctgaaatggcaaagactcactgaggaacaatgcttgttctcagcctggctgtccgaaaaggaagatgccgtgaacaagatccatacgactgggttcaaggaccagaatgagatgctctcctcgcttcaaaagctcgcagtgcttaaggccgatctggagaagaaaaagcagtcgatgggaaagctgtattctctgaagcaagacctgcttagcaccctcaagaacaagtccgttacccagaaaaccgaagcctggctggacaatttcgctcggtgctgggacaatcttgtgcagaaactggaaaagagcactgcgcagatttcgcaggccgtgactaccacgcaaccgtcgttgactcagaccactgtcatggaaacggttactactgtgaccacgcgcgaacagatcctggtgaagcacgcccaagaggagctgcctcctccgccacctcagaagaagcggcaaatcaccgtcgacactctcgagcggctccaggaattgcaggaggctaccgacgagctggatcttaagttgcgccaagcagaagtgattaagggatcctggcaaccggtcggagatctcctgatcgacagcctgcaggatcacctggagaaagtgaaggctctccggggagaaatcgcgcccttgaaggaaaacgtgtcgcacgtgaacgacctcgctcgccagctcactaccctgggcattcagctgtcaccctacaacctttccactttggaagatctcaacacccgctggaagctgttgcaggtcgccgtggaagatcgggtgcggcaactccacgaagcgcatagagatttcggtccagcgtcccaacacttcctctccacctcggtccagggaccatgggaacgggcgatctcccctaacaaggtgccgtactacatcaatcacgaaacccagactacctgctgggatcaccccaagatgaccgagctttaccagagccttgcagacctgaacaatgtcaggttctcggcctatcgcaccgcaatgaaactcaggaggctgcagaaggcgctgtgtctggatctgctgtcattgtcggcagcctgcgacgcactggaccagcacaatctcaagcagaacgaccagccaatggacatcctgcaaatcatcaactgcttgactactatctacgaccgcctggaacaggagcacaataatctggtgaacgtcccattgtgcgtcgacatgtgtcttaactggctgctgaatgtctacgacaccgggcgcaccggaaggatccgggttctgtcctttaagaccggtatcatctccctgtgcaaagcccatcttgaggacaaataccgctacctgttcaagcaggtggccagctcgactggattctgcgaccaacgccggctggggctgctgctccatgactccatccagatcccgcgccagctcggagaagtagcctcattcggtggatcaaatatcgaaccgtcggtgcggagctgctttcagttcgccaacaacaaaccagaaatcgaggcggctctgttcctggactggatgagactcgagccacagtccatggtgtggctgccggtgttgcaccgggtggccgccgctgagactgcgaagcatcaggccaaatgcaatatctgcaaggaatgcccgatcattgggtttcggtatcgctctctcaagcatttcaactacgacatttgtcagtcttgcttcttctcgggacgcgtcgctaaaggccacaaaatgcactaccctatggtggaatactgcaccccaacgacgtcgggtgaagatgtgcgcgattttgccaaggtgttgaaaaacaagtttcgcaccaagagatactttgccaaacatcctagaatgggctacctcccagtgcaaactgtgctcgaaggtgataacatggagactgataccatg

SEQ ID NO: 251311 - DNA, 3591 bp, synthetic construct
  misc_feature 1..3591: note = Description of Artificial Sequence: Synthetic coding sequence
  source 1..3591: mol_type = other DNA
atgctgtggtgggaggaagtggaggactgttacgaacgcgaggacgtgcagaaaaagactttcactaagtgggtgaatgcacagttctccaagtttggaaaacaacacatagagaaccttttttcagatctgcaggatggcagacgcctcctggatcttcttgaaggactgacggggcagaagctgcctaaggagaaggggagcactcgagtccatgcactgaacaacgtcaacaaagcactccgcgtgctccaaaacaataatgtggatctggtcaacattggatccactgatatcgtggacggtaatcataaacttaccctcgggctgatttggaacattatactccactggcaggtgaagaatgtgatgaagaacatcatggcaggacttcagcagactaactccgaaaagatccttttgtcctgggtgagacagtccactagaaattacccgcaggtgaacgtgataaacttcactacgtcatggtccgatggactcgccctgaatgctctgatacactcacatagacctgacctgtttgattggaattccgtggtttgtcaacaaagcgccactcaaagactggaacatgcatttaacatagctcgctaccaactgggaatcgagaagttgcttgatccagaagatgtggatacgacctacccggataagaagtcaattcttatgtatatcacctcgctttttcaagtccttcctcagcaagtttccattgaggcaattcaagaagtggaaatgcttcccagaccccccaaagtgactaaagaggaacacttccaacttcaccatcaaatgcactactctcaacaaattaccgtcagcctggcacaaggatacgaaaggacttcatcgccaaagcccaggtttaagtcatacgcatacacccaggcagcatacgtcactacctcagatcctactcgttcgccattcccgtcccagcaccttgaagcccccgaagataaatccttcggaagctccttgatggaatcggaagtcaatctcgatcgctaccagaccgcattggaggaagtgctctcgtggcttctgtcggcagaggacactctgcaagcacaaggcgagatttcgaatgatgtcgaagtcgtgaaggaccaatttcacactcacgagggctacatgatggacctgaccgcacaccaagggagggttggtaatatccttcaactgggatcgaaactcatcggaactggtaagctcagcgaagatgaagaaactgaagtgcaggaacaaatgaaccttctgaattcgagatgggaatgcctcagagtcgccagcatggagaagcagtccaaccttcatagagtgctcatggacttgcaaaatcaaaagctgaaggagctgaacgattggctgacgaaaaccgaggagcgcacgagaaaaatggaagaagaacctctcggaccagatcttgaagatctcaaaaggcaagtgcaacagcataaagtgctccaggaggacctcgaacaggaacaggtgagggttaattcgctcacccatatggtagtggttgtggacgaatcctccggagatcatgctacggctgcccttgaggaacagcttaaggttctcggagatagatgggctaacatttgtcgctggactgaagatcgatgggtgctccttcaggacattctccttaagtggcaaagacttactgaagaacaatgcctgttctctgcctggctctcggaaaaagaggatgccgtgaacaagattcatacgaccggttttaaggaccagaacgaaatgctttcgagcttgcagaagctcgcggtgctgaaagcagacttggaaaagaagaagcagagcatgggaaagctgtactcactcaaacaagatctgctgagcacgctcaaaaacaagtcagtcactcaaaaaaccgaggcatggcttgataactttgcacgatgttgggacaacctcgtccaaaagctggagaagtcgactgcccaaattagccaagcagtgaccaccactcaaccttccttgacccagaccactgtgatggaaaccgtgactactgtgactactagagagcaaatcctggtcaagcatgcacaggaagaactcccacctccccctcctcagaaaaagcgccaaatcaccgtggatacgctggaaaggttgcaggaactgcaagaagcgaccgatgagcttgatctcaagctgcgacaggccgaagtgatcaaaggatcctggcagccagtgggagatcttcttattgactcccttcaggaccatcttgagaaggtcaaggcactcagaggtgaaatcgctccacttaaagagaacgttagccatgtcaatgatctcgcaagacagctcaccactctgggtatccagctttcgccctacaatctgtcgaccctggaagatcttaacacccgctggaaacttctccaggtggcggtcgaagatcgcgtcagacagctccatgaggcacatcgtgactttggccccgcgtcgcagcactttctgtcaacgagcgtgcaaggtccctgggaaagagcgatcagccctaacaaagtcccttactacattaatcatgaaactcaaaccacctgttgggatcaccctaaaatgaccgaactttatcagtcgctcgctgatctgaacaacgtgcggttttcagcgtaccgaaccgcaatgaaactgcgacgattgcaaaaagcgctttgtctggatctgctgtcacttagcgccgcgtgtgatgcccttgaccaacataacctgaagcaaaatgatcagcctatggacatattgcaaatcattaactgtctgaccaccatatacgatcgactggaacaggagcacaataacctcgtgaacgtgccgctgtgcgtggacatgtgtctcaactggcttctgaatgtttacgacactggccgcaccggacggatacgggtccttagctttaagaccggaattatctcgctctgtaaggcacaccttgaggacaagtaccgctatctctttaagcaggtcgcctcgtcgactggattttgcgaccagcgcagattgggactgctgcttcatgactcaatacagatcccgcgccagctgggagaagtcgcgtccttcgggggaagcaacattgaaccttcggtcagatcctgttttcagttcgcaaataacaaaccggagatcgaggccgcactgtttttggattggatgcggctcgagccacaatccatggtatggctgccagtgctccatcgcgtggctgcagcagagactgccaagcaccaagcaaagtgcaacatatgcaaagagtgtccgattataggttttagatacaggtcccttaagcactttaactatgatatttgccaaagctgcttcttttcaggcagagtcgctaagggccacaaaatgcattaccctatggtcgagtactgtactcccaccacgtccggggaagatgtgcgcgacttcgcaaaagtgctgaagaataagtttagaactaaaaggtatttcgccaagcacccacgaatgggctacctccctgtccagactgtgctggaaggtgacaacatggaaactgacaccatg

SEQ ID NO: 251312 - DNA, 3591 bp, synthetic construct
  misc_feature 1..3591: note = Description of Artificial Sequence: Synthetic coding sequence
  source 1..3591: mol_type = other DNA
atgctttggtgggaagaagtggaagattgttacgaaagagaagatgtgcagaaaaagaccttcaccaagtgggtgaatgcgcaattctccaagtttggcaagcagcacattgagaaccttttctcagaccttcaagatgggcggcggcttcttgatctcctcgaaggccttactgggcaaaagctgccaaaggagaagggctcaacccgggtgcacgcgttgaacaacgtcaataaggcactgagggtcctgcaaaacaacaatgtcgatctggtcaacattggaagcactgacattgtggatggaaaccataagctgactttgggactcatctggaacattattctgcattggcaagtcaagaacgtgatgaagaacatcatggcgggacttcagcagactaacagcgaaaagatcctgctttcctgggtgagacaatcaactcggaattaccctcaagtcaatgtgatcaactttactacctcctggtcagatggactcgcacttaatgcacttatccattcccatcgccctgatctttttgattggaatagcgtcgtctgtcaacagagcgccacccaacgccttgagcacgcatttaacattgcaagataccagctcgggattgaaaaacttctggacccagaagatgtggacaccacctacccagacaagaaatcgatcctgatgtacataacgtctcttttccaagtgctgccccagcaggtgtccatcgaagcaattcaagaagtggaaatgctcccaaggccaccaaaggttaccaaggaagaacattttcagctgcaccaccagatgcactattcacaacagatcactgtgtcactcgcacagggctacgaaagaacctcgtcccctaaacccaggtttaagtcctatgcatacacccaggcagcctacgtgaccacttcggatccaaccagatcgccgttcccctcgcagcatcttgaagcgccagaagataagagctttgggtcctcgcttatggaatccgaagtcaatctcgatagataccaaacggcactggaggaagtgctctcctggctgctgtcggccgaagataccctgcaagcgcagggggaaatatccaacgatgtcgaagtggtgaaggatcagtttcacacccatgagggctacatgatggatctgaccgcccaccaaggcagagtcgggaatattcttcagctcggatcgaaacttattgggaccggaaagttgtcggaagatgaggagactgaggtgcaagaacagatgaatctgctgaactcccgctgggaatgtctgcgtgtggcctcgatggaaaagcagtccaacttgcatagggtgctgatggacctgcagaaccagaagctgaaagaacttaacgactggctgaccaagactgaagaacgcactagaaagatggaagaagaaccgctgggtcccgatctggaggatcttaaacgccaggtgcaacaacataaggtgcttcaggaagatctggaacaggaacaagtgagagtgaactcgcttactcatatggtggtcgtcgtggacgaatcgtcgggagatcatgccaccgcagccctcgaagagcaactgaaggtgctgggagacagatgggcaaacatttgcagatggacggaagatcggtgggtgctgcttcaggatatcttgctcaagtggcaaaggcttactgaagaacagtgcctgttctcagcctggctctcggagaaggaggatgcagtgaacaagattcataccaccggatttaaggatcaaaacgaaatgctgtcctcgcttcaaaagctggcagtgctgaaggcagatctggaaaagaaaaaacaaagcatgggcaagctctactcactgaagcaagatctgctgagcactctcaagaacaagagtgtgactcagaaaaccgaggcctggctggataacttcgccagatgttgggataacctggttcaaaaacttgaaaagtccactgcgcagatatcccaagccgtcacgactactcagccctcgcttacgcaaactaccgtgatggaaactgtgactaccgtcactacccgagaacagattcttgtgaaacatgcacaagaggaactcccgcctcctcccccacagaagaagaggcaaattaccgtggataccctggaacggctccaagagctccaagaagcaactgatgaactcgatctgaaactccgtcaagccgaagtcatcaagggtagctggcagccagtgggagatctgctgattgactccctccaggatcatcttgaaaaagtgaaggccctgagaggagaaattgcgccgctcaaggaaaatgtgagccacgtgaatgatctggcacggcagcttaccactctggggatccaactttcgccatacaatctctccacccttgaggacctgaacacgcgatggaagttgctccaagtggcagtcgaggatcgagtgaggcaactgcatgaggcgcacagggattttggacctgcaagccaacatttcctctcgacctcggtgcaaggaccctgggagagagcgatttctccaaataaggtgccatactacatcaaccacgaaactcaaaccacttgctgggatcatcccaagatgaccgagctttaccagagccttgcggaccttaacaacgtacgcttttcggcttaccgcactgctatgaaactgcgtcggcttcaaaaagcactctgtctggatctcctttccctttcggcagcatgtgacgccctggaccagcataatctcaagcagaatgatcaacctatggatattctccagattatcaattgtctcaccaccatttatgatagacttgaacaagaacataacaatctggtgaatgtccccctttgtgtggatatgtgtctgaactggcttcttaatgtgtacgacaccggccggaccggaaggatcagagtcctgtcgtttaagaccggaatcatttcactttgcaaagcccacctggaagataagtaccgttatttgttcaaacaggtcgcgtcgtctacgggattttgtgaccagcggaggctgggacttctgcttcacgattccattcagatacctcggcaactgggagaggtcgcatcattcggcggatcgaacatcgaacccagcgtgcggagctgcttccagtttgccaacaataagccagagatcgaagcagccctgttcttggactggatgagactggaaccacaaagtatggtgtggttgcctgtgttgcatcgcgtggcagccgcagaaaccgcaaagcatcaagcgaaatgcaatatctgtaaagaatgtccgattattgggttccgctacagatcgctgaaacactttaactacgacatatgccagtcgtgcttcttttcgggccgcgtggcaaagggccacaagatgcattaccctatggtggaatactgtactccgacgacctcaggtgaggacgtgcgcgattttgcaaaggtgcttaagaacaaattcagaactaaaagatactttgccaagcaccccagaatgggttacctccctgtccaaaccgtgcttgaaggtgataacatggaaaccgacactatg

SEQ ID NO: 251313 - DNA, 3591 bp, synthetic construct
  misc_feature 1..3591: note = Description of Artificial Sequence: Synthetic coding sequence
  source 1..3591: mol_type = other DNA
atgctatggtgggaagaggtggaggactgctacgagagggaagacgtccagaaaaaaacatttacaaagtgggttaatgcacagtttagcaagttcggcaaacaacacatcgagaatcttttctcggatctgcaggacggaagaaggcttttggacctccttgaggggctgactggacaaaagctcccaaaggagaagggatcaaccagggttcacgctttgaacaacgtcaacaaagccctgcgcgtgttgcaaaacaataacgttgatctggtgaacatcggctctacagatattgtggatggtaaccacaagctcacactgggccttatttggaacatcatactgcactggcaggtaaaaaacgtcatgaaaaatattatggctggacttcaacaaacgaactccgagaaaatcctgctgagttgggttagacagtctacccgcaactatccacaggtgaacgtgataaacttcacaacctcttggagcgatgggctggccctcaacgccctgattcactcccaccgcccagacttgtttgactggaacagcgtcgtgtgccaacagtcagccacacagcgtctggagcacgcttttaacatcgcacgataccaattaggaatcgaaaaactgttggaccctgaagatgtggacacaacctatcccgataagaaaagtatcttaatgtatataaccagcctgtttcaagttctgccccagcaggtgagcattgaagcaatccaggaggtagagatgctccctcgcccgccaaaggtcacaaaagaagaacactttcagctgcaccaccagatgcactattctcagcaaatcacagtgtccctcgcccagggctacgaacggacgagctctccgaaaccaaggttcaagagctatgcctatacccaagctgcctatgtgacaaccagtgacccaactagatcaccatttccctcacaacacctcgaggccccagaagataagtcttttggtagttccttaatggaaagcgaagtgaatctggataggtatcagacagcacttgaagaggtgttgagctggctccttagcgcggaagataccctccaagcgcaaggcgagatcagcaacgatgtcgaagttgtaaaagaccagtttcatactcacgagggttacatgatggacctgaccgcccaccaaggaagagtcggaaacatccttcagcttggcagtaagctgatcggcactggcaagctgagcgaagatgaggaaactgaggtgcaggaacagatgaaccttctgaacagcagatgggagtgcctgagggttgcaagtatggagaaacaatctaacctgcaccgagtcctgatggaccttcaaaaccagaaactgaaagaattgaacgattggctgacaaaaaccgaggaaaggacacgaaagatggaagaggaaccactggggccagatctagaggatctcaagaggcaagtccaacaacacaaggtcctgcaggaagacctcgaacaagagcaggtccgggtgaactccttgacacatatggtggttgtcgtcgatgaaagcagcggagaccatgctacagccgcacttgaagagcaacttaaggtactgggggatcgatgggctaacatttgtcgttggacggaggataggtgggtgctcctgcaggatatcctgctcaaatggcagaggctgactgaagaacagtgcttattttctgcttggctgtctgaaaaagaagacgcagtcaataaaatccacacaaccggatttaaagatcagaatgagatgctctctagtctgcagaaactggccgtgttgaaggctgaccttgagaagaaaaaacagtccatgggaaaactgtactctctgaagcaagatcttcttagtactctcaaaaacaagagtgtgacccagaaaacagaggcttggctggataacttcgcacgctgctgggacaacctggtccagaaactggagaagtccactgcgcaaatctcacaggcggtgacaaccactcagcctagcctcacccaaaccaccgtcatggaaaccgtgacgaccgttacaacccgtgagcagatcctggtgaaacatgcgcaggaagagctgcccccaccacctccacagaagaaaagacaaatcaccgtcgatactctggagcggctccaggaactccaagaggctaccgacgagctagatctcaagctgaggcaggccgaagtcataaagggaagttggcagcctgtgggggatctgcttatagattctttacaggatcatttggagaaagttaaagcactgaggggagagattgcccctctgaaagagaatgtgagccatgtgaacgatctggcacgccaacttaccactctcgggatccaactgagcccatacaacctgagcaccttggaggatctgaatacgcgatggaagctgctgcaagtggccgtggaagatagggtgagacagctgcacgaggcccaccgtgattttggcccagcctctcaacacttcctgtctactagtgtgcagggtccttgggaacgcgcaatcagccccaataaggtgccatactacatcaaccacgagacgcagactacctgctgggaccatcctaagatgacagaactctatcaaagcctagcagatctgaataacgtgcgcttttccgcttatagaaccgccatgaaactcagaaggctgcagaaggcactgtgtcttgacctgctgtcactctctgctgcttgtgacgctcttgatcagcataacctgaaacaaaacgatcaaccaatggatatactccagatcattaactgtttgacaactatttacgacagactggagcaggagcacaacaaccttgtgaacgtgcctctttgcgtggatatgtgtctcaactggctgcttaacgtttacgataccggccggactggaagaattagagtcctgtcattcaaaactggcatcatctccctctgcaaggcccatcttgaggacaagtacaggtatctgtttaaacaagtcgcctcaagcacagggttttgcgatcaacggcgcttggggcttctactgcatgatagcatccaaattccaagacagctgggcgaagtggctagtttcggcgggagcaacatcgagcctagcgtgcgttcgtgtttccaattcgctaacaacaaacctgagatagaggctgctctttttctggattggatgcggttagaacctcaaagcatggtttggctgccagtgcttcatagggtggctgccgctgagaccgccaagcaccaggcgaaatgcaatatttgcaaagaatgtcctataatcggatttcgttataggagccttaaacatttcaattacgacatctgtcaatcttgctttttcagcggaagagtggcaaagggacacaagatgcattatccaatggtcgaatactgcactcctacaaccagcggagaagatgtgcgtgatttcgctaaagttctcaagaacaaattccgcactaaaaggtacttcgcgaaacatccgcgcatgggctacctccccgtgcagactgtcttggagggcgataacatggagaccgatacgatg

SEQ ID NO: 251314 - DNA, 3591 bp, synthetic construct
  misc_feature 1..3591: note = Description of Artificial Sequence: Synthetic coding sequence
  source 1..3591: mol_type = other DNA
atgctgtggtgggaggaggtcgaagattgttacgagcgcgaggacgtgcagaaaaagacttttactaagtgggtcaacgcacagttctctaagtttggaaagcaacatattgaaaacctgttctccgatttgcaagacggacggcggctgctcgacctccttgagggattgactggacaaaagttgccgaaggaaaagggatcaactcgggtccatgcgttgaacaacgtgaacaaagccttgagggtactgcagaacaacaatgtggaccttgtgaacattggttcgactgatatcgtggatggcaatcataaacttaccctgggactgatctggaacataattctgcattggcaagtgaagaatgtgatgaagaatatcatggctggactgcagcagaccaactccgaaaagattctcctgagctgggtgagacaatcgacccggaactaccctcaagtcaatgtgatcaacttcaccactagctggtccgacggtctggccctgaatgctctgatccattcccaccggcctgatttgttcgattggaactcggtggtgtgccaacagagcgccactcagcgactggaacacgcatttaacatcgccaggtaccagctgggtatcgagaagctgctggacccggaggacgtggatactacctacccagacaaaaagtcgatcctcatgtacattacttcgctctttcaagtcctgccacagcaggtgtcgatcgaagccatccaagaagtggagatgttgccgcgcccgccgaaggtgacgaaggaggagcactttcagctgcaccatcagatgcattattcgcagcaaattaccgtctcactggcccagggatacgaacggacctcgagccctaagccgaggttcaagtcgtacgcatacacccaggcggcgtacgtgactacttccgacccaaccagatccccgtttccatcccaacatttggaagccccagaagataagtcgttcggctcttcattgatggagagcgaggtcaacctggaccgctaccaaacggctctggaggaagtgctctcgtggctcctctcagcagaagataccctgcaggcgcagggcgagatctcaaatgacgtcgaagtggtgaaggaccagttccacactcatgaaggatacatgatggacctcactgcccatcaggggcgcgtgggcaacatcttgcagctgggatcgaagctcatcggaactggaaaacttagcgaggacgaggaaactgaggttcaggagcaaatgaatctcttgaactcgcgctgggagtgcctccgggtcgctagcatggagaaacaatcgaacttgcatcgggtgttgatggacctccagaaccagaagctcaaggaactgaacgactggctcaccaagaccgaagagagaacgagaaagatggaagaagaacccctgggaccagacctggaagatcttaagcgccaagtgcagcaacacaaggtgctgcaggaagatctggagcaagaacaggtgcgcgtgaactcgctgactcacatggtggtggtggtcgacgagtcgagcggagatcatgctactgccgccctcgaagagcagctgaaggtcctcggggaccgctgggccaatatctgcagatggacggaggatagatgggtgctcctgcaagacatcctccttaaatggcagagactgaccgaagagcagtgccttttcagcgcttggctgtcggaaaaggaggatgcggtcaataagatccacactactggattcaaagatcagaatgaaatgttgagctcgctgcagaagctcgccgtgctcaaggcggacctggagaaaaagaagcagtccatgggaaaactgtactctctgaagcaggatctgctttcgacgcttaagaataagtccgtgacgcaaaagacggaggcatggctggataacttcgcacgatgttgggacaacttggtgcagaaactggaaaaatccactgctcagatctcccaggcggtgactaccacccaaccgtcgctgactcagaccaccgtgatggaaaccgtgacgaccgtgaccactcgggagcaaatcctggtcaagcatgcacaagaagagcttccgcctcctcctccgcaaaagaagagacaaatcactgtcgatactctggagcgcctgcaggagctccaggaagcgaccgacgaacttgacttgaagctcagacaagcagaggtgattaagggatcctggcagcccgttggagatctgctgatcgattcacttcaggaccatctggagaaggtgaaggcccttcggggagagatcgccccgctgaaggaaaatgtgtcccacgtcaacgacctcgcgcgccagctgaccactttgggcatccagctgagcccctacaatctgtcaaccttggaggacctgaatactcgctggaaactcctccaggtggccgttgaagatcgcgtgcgacaactgcacgaggcgcaccgggatttcggacctgcctcgcaacacttcctctcgacctcggtgcaagggccgtgggagcgcgctatcagcccgaacaaagtgccatactacatcaatcacgaaactcagaccacgtgttgggatcacccgaagatgactgagctgtaccagtcgctggccgatctgaataacgtccggttttccgcttaccgcaccgccatgaagttgcgccgcctccagaaggccctgtgcctcgatctgctctccctcagcgcggcgtgcgatgcgctggaccaacacaacctgaagcagaatgatcagcctatggacatcctccagatcatcaattgtctgacgactatctacgaccgcctggaacaggaacacaacaatctggtgaatgtaccactgtgtgtcgatatgtgcctgaactggctccttaatgtgtatgacactggacggaccggcagaattagagtgctgtcgttcaagaccggcattatctccctctgtaaggctcatctggaggacaaatatcgctacctgtttaagcaggtggcctcgtccacgggattctgcgaccagcgcaggctgggactcttgctgcatgattcaatccaaattccgcgccagctgggagaagtcgcctcattcggaggctcgaacatcgagccgtcagtccggtcctgtttccagttcgctaacaataagccagagatcgaagctgcgctgtttctcgattggatgcgcctcgagccgcaaagcatggtctggctcccggtcctgcaccgcgtggctgccgctgagactgcaaagcatcaggccaagtgcaacatctgcaaagagtgccctatcatcgggttccggtaccggtccttgaagcatttcaactacgatatctgccaatcctgttttttctccggcagggtggcaaaggggcacaaaatgcactacccgatggtcgagtactgtactccaaccacctccggtgaagatgtgagagactttgccaaggtgctgaagaacaagttcagaaccaagcgctactttgccaagcatccaagaatgggatacctgccggtgcagactgtgctcgaaggggacaatatggagacggacacgatg

SEQ ID NO: 251315 - DNA, 3591 bp, synthetic construct
  misc_feature 1..3591: note = Description of Artificial Sequence: Synthetic coding sequence
  source 1..3591: mol_type = other DNA
atgctttggtgggaggaggtagaggattgttacgagcgggaggacgtccaaaagaagacttttaccaagtgggttaatgcgcaattcagcaagtttggcaagcagcacatcgagaacctgttctccgatctccaggatggcaggagactcctggacctgctggagggcctcacaggtcaaaagctccctaaagaaaaaggttccacccgcgtccatgccctgaacaacgtgaacaaggccttgcgtgtcttacagaataataacgttgacctagttaacatcggttccactgacatcgttgatggtaatcacaagctcaccctcggactgatctggaacatcattctgcattggcaggtgaagaacgtcatgaaaaacattatggctggactacaacagaccaactcggagaaaatccttctgagctgggtccgccagtcaactcggaactacccccaggtcaacgtcatcaatttcaccaccagctggtcggatggcctggcactgaacgccctgatccattcccaccgcccggacctgtttgattggaacagtgtggtttgccaacagtctgccacccagagactggagcacgcattcaacatcgcgcgctaccagctcggtatagagaagctcctcgaccccgaagacgtggacaccacctatcccgacaagaagtccatcttaatgtatatcaccagtttgttccaggttctgcctcaacaggtttcgatcgaggccatccaggaagtcgaaatgcttcctcgccccccaaaggtgaccaaggaggaacacttccagctgcatcaccagatgcattactcccaacagatcactgtctccctcgctcaaggttacgagcggacctcctcgcctaagcctcgcttcaagtcctacgcctacacccaggcagcgtacgtgactacctccgaccccacccgcagccccttcccatctcagcacctcgaagcccccgaagacaagagcttcggctccagcctgatggaatccgaggtgaatctcgatcggtaccagacggcgctcgaggaggtgttgtcgtggctgttatccgcggaggataccctacaggcccagggagagatttctaacgatgtcgaggttgttaaggatcagttccacacgcacgagggctatatgatggacctcactgcccaccagggccgtgtgggcaacattctgcagctgggctcgaagcttatcggcactggaaagttgagcgaggacgaggaaacagaagttcaggagcagatgaacctgctgaacagccgttgggagtgtttaagagtggccagcatggaaaagcagtctaatttacaccgtgttctgatggacttacagaaccaaaagctcaaagagctgaacgactggcttactaaaaccgaggaacgaacgcgcaagatggaggaggagcccctgggtcctgacctcgaggacctgaagagacaagtccaacagcacaaggtcttgcaagaggacctcgagcaggagcaggttcgggtcaactcgctgacccatatggtcgtggtcgtggatgagagctccggagaccacgccactgcagccctggaggagcagcttaaggtgttgggcgaccgctgggccaacatctgtcgctggaccgaggaccgttgggtgttgctacaggacatccttcttaagtggcagcgcctgacggaagagcagtgcctcttctcggcttggttgtccgagaaggaggatgcggttaataagatccataccaccggtttcaaggatcagaatgagatgctcagttctctccagaagcttgccgttttgaaggctgatctggaaaagaagaagcagtccatgggtaagttgtatagtcttaaacaggaccttcttagtacgctgaagaacaagagcgtcactcaaaagactgaagcctggctcgataatttcgcacgctgttgggacaacctggtccagaaactggagaagagcaccgcccagatctctcaggccgtcaccaccacccagccgtccctcacccagacgaccgtgatggagacagtcacgaccgtcaccacccgcgagcagattttggttaagcacgcccaagaggagttaccaccccctcctccccagaagaaacgccagatcacagttgatactcttgagcgcctccaggagctccaggaggccaccgacgagctagacttgaagctccgtcaggcagaggtgattaagggctcttggcaaccagtcggcgatctcctgatagactctctccaggaccacctggagaaggtgaaagctctgcgtggtgaaattgcaccgctgaaggagaatgtctcccacgtcaacgatctggctcgacaattgaccaccctaggtatccagttgagcccgtacaacttgtccacccttgaggacctgaacactcgctggaagttactccaggtcgccgttgaggaccgcgtccggcagctgcacgaggctcaccgcgacttcggccccgcctcgcagcacttcctttcgaccagcgtccagggcccctgggaacgtgccataagccccaacaaggtgccctactacattaaccacgagacgcagaccacgtgctgggaccatcctaagatgaccgaactataccagtcgctcgcggacctgaacaatgtccgattctccgcatatcgtaccgccatgaaactccgtcgtctgcagaaggccctgtgtttagacttgttgtctttgtcagccgcttgcgatgccctggaccaacataacttgaagcagaacgatcagcctatggacatccttcagattatcaattgtctgaccaccatctacgaccggctcgagcaggagcataacaacctggtgaacgttcccctgtgcgtcgacatgtgtctgaattggctgttgaatgtctacgacacgggccgcaccggtcgtatccgtgttctctccttcaagactgggattatttcgctgtgcaaggcacacctggaggacaagtaccgctacttgttcaagcaggtcgcatcctcgaccggcttttgcgaccagcgtcggctgggcctccttttgcacgacagtattcaaatcccccgccagctcggtgaggtggcgtcgttcgggggttctaacatcgagcctagtgtgcgtagttgtttccagttcgcaaacaacaagcccgagatcgaggccgcgctgttcttggactggatgcggcttgagcctcagagtatggtttggctgccggtactgcatcgtgtcgctgctgccgagaccgccaagcatcaagcgaaatgcaacatttgcaaggagtgcccgatcattggatttcgatacagatcgcttaagcatttcaactatgacatctgtcagtcttgttttttctcgggccgcgtcgctaagggccacaagatgcactaccctatggtggaatactgtaccccaaccactagcggtgaggatgtacgcgatttcgcgaaggtcctcaagaacaagtttcggactaagcgctacttcgctaagcatccgagaatgggctacctccccgtccagacggtgcttgagggtgacaacatggagaccgatactatg

SEQ ID NO: 251316 - DNA, 3591 bp, synthetic construct
  misc_feature 1..3591: note = Description of Artificial Sequence: Synthetic coding sequence
  source 1..3591: mol_type = other DNA
atgctctggtgggaagaggtggaagactgctacgaaagggaggacgtgcagaagaaaactttcactaagtgggtcaatgcgcagttctctaaatttggaaaacagcatattgaaaacctattttccgatctccaggacgggcgtagacttttggacctgctggaggggttaaccggtcagaaattgcctaaggagaagggttccactagggtgcacgccttgaacaatgtcaacaaggctttgagagtcctgcaaaataacaatgtggacctggttaacatcggttcaactgacatcgtggatggcaatcataagctgacgcttgggctgatctggaacatcattctgcactggcaagtaaagaatgtgatgaagaacatcatggccggcctgcagcagactaactccgagaagatactgctgtcgtgggtgaggcaaagcacaagaaattatccccaggtgaatgtaataaactttaccaccagttggtccgacggtctggccctcaacgccctgatacactcccatcgacccgatctgtttgactggaattctgtggtgtgccagcagagcgccacccagcgactggagcacgcctttaacatcgcccgttaccagctgggtatagaaaagctcctggatccagaggatgttgatacgacataccccgacaagaaatctattctgatgtacatcacttctcttttccaggtgctgccccagcaagtatctatcgaagccattcaagaagtggagatgctcccccgacctcctaaagtgaccaaagaggagcattttcagctccatcatcagatgcattatagccagcaaattaccgtctccctggcgcaagggtacgagagaacaagctcccccaagccaagattcaagagctacgcttacacccaggcagcctatgtgaccacctcggatcctacacgcagtccgtttcccagccaacacctggaggcaccagaggataagtcctttgggtctagccttatggaatccgaggttaatcttgacaggtatcagacagccttggaggaagttttgagctggctgctgtccgcggaggacacattgcaggctcagggtgaaatcagcaacgacgtcgaagtggtaaaggaccagttccatacccatgaagggtatatgatggatcttacagcacatcaaggcagagtggggaacattctgcagctgggatctaagctgattggaactggtaagctgtccgaagatgaggaaactgaagtgcaggagcaaatgaatcttctgaactccaggtgggaatgcctaagggttgcttccatggagaagcagtccaaccttcacagggtcttgatggatctccagaatcagaaactgaaagaactgaacgattggctgaccaaaacggaagagaggaccagaaaaatggaagaggagccccttggccctgatctggaggatttgaagcgacaggttcaacagcacaaggttctacaggaagatctggagcaggaacaggtgcgtgtcaattctcttacacacatggtcgtggtggtagacgagtccagtggcgaccatgccacggccgcattggaagagcagttgaaggtattgggcgaccgctgggcaaatatttgccgttggactgaagatcgttgggttctgctgcaggatattcttctgaagtggcagagactgaccgaagagcagtgcctcttctcggcctggctgtccgagaaggaggatgctgtgaacaagatccatactaccgggtttaaagatcagaacgaaatgctttctagcctccagaaactggcggtcctcaaagccgatctggaaaagaaaaaacagtccatgggcaaattgtactctctcaaacaggacttgctcagcaccctaaaaaacaaatctgtgactcaaaagaccgaagcctggctggacaacttcgctcgatgctgggacaatctcgtgcagaaattggagaagtccaccgcacaaatcagtcaggccgtaaccactacacagcccagcctgacccagacaacagtgatggaaaccgtgacaactgtgactacccgagaacagattctagtaaagcatgcacaagaggaactaccacctccccccccccaaaagaagcgacaaattacagtggatactcttgagaggctacaggaactgcaggaggctacagacgagttggacttgaagctgagacaggccgaagttatcaaggggtcctggcagcctgttggcgacctgttgatcgactccttgcaggatcaccttgagaaggtgaaggccttgaggggagagattgctccgctgaaggagaatgtgagccacgttaatgatctggcccggcagctgactacgctgggaatccaactgtccccttataatctgagcacgctggaagatctgaacactagatggaaattgctccaggtcgccgttgaagaccgggtacgacaattacacgaggcacacagagacttcgggccggcctctcaacacttcctctccactagtgtgcagggcccctgggaacgcgcaatctcccccaacaaggtaccctattatatcaaccacgaaacacagacaacttgctgggatcaccccaaaatgacagagctctatcagagtctcgcagatctcaacaatgtgcgattctccgcctatcggacggccatgaagcttagaaggctacaaaaggcactgtgcctggatctgctgtcactgagcgcagcttgcgacgcgttggaccagcataatctgaagcagaacgaccagccaatggacattctgcaaatcattaactgtctgacaacaatctacgacagacttgagcaagaacataataacttggtcaatgtccctctgtgcgtggacatgtgtctgaactggttgctgaacgtttacgatacaggtcgaacagggcgcattagagtcctgtccttcaaaactgggataatcagcctttgcaaggcccacctcgaggacaagtataggtacttgtttaagcaagtcgccagctcaactgggttctgtgaccagagacgcctaggccttctgcttcacgattccatccagatacccagacagttaggagaggtagcctcattcggtggatctaacatcgaaccttctgtgagaagctgtttccagtttgcaaataacaagcccgagatagaggctgctctttttctggactggatgcgattggaaccccaatctatggtctggctgcccgtgctgcatagggtggccgccgccgagaccgctaagcaccaggctaagtgcaacatatgcaaggagtgcccaattataggttttcggtatagatcattgaaacacttcaactacgatatctgtcagtcctgttttttcagcggccgggtcgccaaaggccataaaatgcattatccaatggtggaatactgcacacccactaccagtggggaggacgtgagagatttcgctaaggtcctgaagaataagtttagaacgaagcgatatttcgcgaagcacccaagaatgggttacctcccagtgcagaccgtgttagaaggagacaatatggagacagatactatg

SEQ ID NO: 251317 - DNA, 3591 bp, synthetic construct
  misc_feature 1..3591: note = Description of Artificial Sequence: Synthetic coding sequence
  source 1..3591: mol_type = other DNA
atgttgtggtgggaagaagttgaggattgttacgaaagagaagacgtacaaaagaagacttttaccaaatgggtgaacgcgcaattttcaaagttcggcaaacagcatatcgagaacttgttcagtgatcttcaggatggtcgtaggctgctagatctcttggaagggttaaccgggcagaaattgcctaaggaaaaaggttcaactcgtgttcatgcgcttaataacgtcaacaaggcgcttagggtgctacagaataacaatgtggatcttgtgaacatcggaagcacagatattgttgacggtaaccataagctcaccctaggactcatttggaacatcattcttcattggcaagtcaagaatgttatgaagaatattatggccggtctacaacagactaactcagaaaagattttactatcatgggtacgccagtcaactagaaattacccacaggttaatgtgataaatttcacgacttcatggagcgatggtcttgctcttaatgcgctaattcactctcatcgacctgacctattcgactggaattctgtcgtgtgtcaacagtctgcgacccagaggcttgagcatgcatttaacatcgcaagatatcaattgggaattgaaaagttgctcgaccccgaggatgtggatacaacatatcctgacaagaagtctatccttatgtacatcacatcccttttccaagttctgcctcaacaggttagcattgaggcaattcaggaggtagagatgctacctcgtccaccaaaggtcacgaaagaggaacattttcagctccaccaccagatgcattattcacaacagattaccgtgtcacttgctcaaggatatgaaaggacctctagcccaaagcctagatttaagtcttatgcttacacacaggctgcttatgttactacttcagatcctactagaagtccgttcccgagccagcatctcgaggctccagaagataagagcttcggtagctcgttgatggagtcagaggttaatcttgatagatatcaaacagctcttgaagaagtgctttcatggttattatccgccgaggatacactgcaggctcagggagagatatctaatgatgtggaggttgttaaggaccaatttcatacacatgaggggtacatgatggatctgactgcacatcaaggtagagttggcaacatattgcaattgggtagtaagttaatcggaacaggcaagctctcggaagatgaggaaaccgaagtacaagagcaaatgaatctacttaacagccgttgggagtgtttgagggtcgcttctatggagaaacagtcaaatctccatagagttctgatggatttgcaaaatcaaaaattgaaggaactgaatgattggcttacaaagactgaagagaggactcggaaaatggaagaggaacctctcggacctgacctcgaagatctcaagagacaagtccaacagcacaaggtccttcaggaagatctcgaacaagaacaggttagagttaacagtttgacacacatggtggttgttgttgacgaatcctcgggagaccacgctaccgcagctttagaggaacagttgaaagtactcggggatcgatgggcaaacatttgccgatggaccgaagatcggtgggttctactccaagatattcttctaaaatggcaacgactcactgaggagcagtgcctcttttcagcatggttgtccgagaaggaggacgctgttaacaaaattcatacaaccggatttaaggatcaaaacgaaatgttaagttccctccaaaagctagcagtgttgaaggccgatcttgagaaaaaaaaacaatctatgggaaagctttattcgttgaagcaggatttactttcaactttaaagaataagtctgttactcaaaagactgaggcttggctcgacaacttcgcgcggtgttgggataacctcgtccagaagttggaaaaatctacagcacaaatctcccaggctgttaccactactcaaccatcgctcactcagacaacggttatggagactgtaactactgtaacgacaagggaacaaattcttgtgaaacatgcccaggaggaattacctcctccaccaccacaaaagaagcgacaaatcactgttgatactcttgaaagattgcaggaattacaagaggcaacggatgaactcgatctcaaattgcgacaagctgaggtcattaaaggtagctggcaaccagttggagatcttctaattgactctttacaggaccatcttgagaaggttaaggctcttagaggtgaaatcgctcctctcaaggagaatgtcagtcatgtcaacgatcttgctaggcaacttaccacgctgggcatccagctgtctccgtacaatctcagcacattggaggatttgaatacccgctggaaactgcttcaagtggctgttgaggacagggtcagacaattgcatgaggctcatcgcgattttggacctgcatctcaacatttcctgtctacatcagtacaaggtccatgggaacgtgctatcagtcctaataaggttccttattacattaatcatgaaacacagacaacttgctgggatcacccaaaaatgactgagctgtaccaaagcttagccgatctgaataacgtgagattcagcgcttatcggacggcaatgaagctcagaagactgcagaaagcattgtgccttgaccttcttagcctctccgcagcttgcgatgcccttgatcagcataatcttaagcagaacgaccaaccgatggacatacttcagataatcaattgtctaacaactatttatgatcgattggagcaggaacataataacttggttaacgtacctctgtgtgttgatatgtgtctcaattggttactgaacgtgtacgacactggaagaacagggagaatacgtgttctgtcattcaaaactgggatcatcagtctttgtaaagcacacctggaggacaaatacaggtacctttttaagcaagtcgcttcctcaacaggattttgcgatcaaaggaggcttgggcttctgcttcatgacagcattcaaattccaagacaacttggtgaagtagcctcatttggaggttcgaatattgagccatcagtcaggtcatgcttccagttcgccaacaacaagcctgaaattgaagccgctttgttcctagattggatgcggttggagcctcaatctatggtttggttgcctgttttacatagggtagctgcggcagagactgctaaacatcaggctaagtgtaacatctgtaaggaatgtcctattattgggtttcgatatcgtagcctgaaacacttcaattatgatatctgccaatcatgttttttctccggtagggtggctaaaggtcacaaaatgcattacccaatggttgaatattgtactccgaccaccagcggtgaagacgttagagactttgctaaggtcttgaaaaataagtttcgaacaaagcgttatttcgcgaaacacccaaggatgggctatctcccagttcaaaccgtgctggaaggagacaatatggagacagatactatg

SEQ ID NO: 251318 - DNA, 3591 bp, synthetic construct
  misc_feature 1..3591: note = Description of Artificial Sequence: Synthetic coding sequence
  source 1..3591: mol_type = other DNA
atgctctggtgggaggaagtcgaggattgttatgaacgcgaagatgtccaaaagaaaacctttaccaaatgggtgaatgcacagttttcgaagttcggaaagcaacatatagaaaatcttttctccgatttgcaagatggcaggcgacttctcgaccttctggaaggtcttaccggccagaagctccccaaggaaaaaggatccactagggtccatgcacttaacaacgtgaacaaggcacttcgcgtgctccagaacaataacgtggatctggtgaatatcggcagcaccgacattgtggacggtaaccataagttgacgctgggacttatctggaacattatcctgcattggcaggtgaaaaacgtgatgaaaaacatcatggccggacttcagcaaacgaactcggagaagattctcctgtcatgggtccggcagtcgaccaggaactaccctcaagtgaacgtcattaactttactaccagctggagcgatggcctggccctgaacgcactgatccatagccatcgcccagatctttttgactggaactcggtggtgtgtcagcaatcggcaactcaacggctcgagcacgcgtttaacattgcacggtaccaactgggaatagaaaaactcctggaccccgaggatgtggatactacctacccagataagaaatccatcttgatgtacattacttctctgttccaagtgctcccacaacaagtgagcatcgaagcaatccaagaggtggaaatgcttccaagacccccaaaagtgaccaaggaagagcatttccaacttcatcatcagatgcattattctcaacaaattaccgtctccctcgcccagggatacgaacgtacttcgagcccaaaaccgcgcttcaagtcatacgcctacactcaagcagcatacgtgacgacctcggatcctactcgttcaccattcccttcgcaacatctggaagccccggaagataagtcctttggctcgtccctgatggaatcagaggttaacttggataggtaccagactgcgctcgaagaagtgctgtcctggctcctcagcgcagaagatacccttcaagcccagggggaaatcagcaacgacgtggaagtggtcaaggatcaatttcatacccacgaaggctacatgatggatctgaccgcgcaccaaggaagggtggggaatattcttcaacttggatccaaactgattggaacgggcaagctgagcgaggacgaggagactgaagtgcaggagcagatgaaccttttgaacagccgctgggagtgtttgagagtggcatcgatggaaaagcaaagcaacctccacagagtcctcatggacttgcagaaccaaaagctgaaggagcttaacgattggctgaccaagaccgaagaaaggaccagaaagatggaagaagaaccactcgggcctgatcttgaggatcttaagcgtcaagtgcagcaacataaagtgctccaagaggacctggaacaagaacaggtccgagttaattccctgacccatatggtcgtggtcgtcgatgaatcgtccggtgatcatgcaaccgcggccctcgaagagcaactcaaagtgctgggcgaccgttgggcaaacatctgccgatggaccgaagatagatgggtccttctccaagatatcctgcttaaatggcaacggctgaccgaggagcagtgtctgttttccgcatggctgtcggaaaaggaagatgccgtcaacaagattcacactactggattcaaggatcagaacgagatgctgtcatctctgcagaagctggcagtgctgaaggcagatctggagaagaagaagcaaagcatggggaagctctacagcctgaagcaagatctgctgtcaactctcaagaacaagtccgtcacccaaaagaccgaagcctggctggacaattttgctcgttgttgggacaacttggtccaaaaactggaaaaatctaccgcacagatctcacaagcggtgaccaccacgcaaccatcacttactcaaaccaccgttatggagactgtgaccacggtgactaccagagaacagattcttgtgaagcacgctcaggaggaactccctccacccccaccgcaaaagaagcgccagataactgtggatactcttgagcgactgcaggagcttcaggaagccaccgatgagcttgatctgaaacttaggcaagcagaagtcattaaaggttcctggcaacctgtcggtgaccttttgatagactctcttcaagaccatctggagaaggtcaaggcgttgagaggggagattgcgcctctgaaggaaaacgtgtcccacgtcaatgacctcgctagacaactgactaccctcggcattcagctcagcccgtacaacctctccacccttgaagatctgaacaccaggtggaaactgctccaggtggcagtggaagatcgcgtgagacaactgcacgaagcacatagagacttcggacctgcatcgcaacatttcctttccacgtccgtgcagggcccttgggagagagcaatttcacctaataaggtgccctactacattaaccatgaaactcaaacgacctgttgggatcatccaaagatgactgaactgtaccaatccctggccgatctgaacaatgtgagattttcagcataccgtactgccatgaagctccggcgattgcagaaggccctctgcctcgacctgctgtcattgtccgcagcatgtgacgcactggatcaacataatctgaagcagaatgatcagcctatggatattctgcagattatcaactgtctgaccaccatatacgataggctggagcaggagcataacaatcttgttaacgtgcctctgtgtgtggatatgtgccttaactggctcctgaacgtgtacgatacgggaaggactggaaggattcgggtgctttcgttcaagaccggtatcatttcgctttgtaaagcgcatctcgaagataagtatcggtacctgtttaagcaggtcgcaagctccactggattttgtgatcaacgccggctgggtctgcttttgcacgattccatccaaattcctcgacaactcggggaagtcgcatcgttcggagggtcaaatatcgaaccttcagtccgatcgtgttttcagtttgcaaacaacaagcccgaaatcgaagcggcgctttttctcgactggatgcggctcgaacctcagtcgatggtctggcttccagtgcttcatcgcgtcgcggcagctgagacggcaaagcatcaggcaaagtgtaacatttgcaaggaatgtccgataattggattcaggtacagatcccttaagcacttcaattacgacatttgtcagtcctgttttttcagcggcagagtggcaaagggtcataagatgcattatccaatggtggaatactgcaccccgaccacgtcaggcgaagatgtgagagattttgcaaaagtgctgaaaaacaagtttcgcaccaagcgctattttgccaagcaccctagaatgggatacctgcctgtgcaaaccgttctggaaggagacaacatggaaactgacacgatg

SEQ ID NO: 251319 - DNA, 3591 bp, synthetic construct
  misc_feature 1..3591: note = Description of Artificial Sequence: Synthetic coding sequence
  source 1..3591: mol_type = other DNA
atgctttggtgggaagaagtggaggactgttacgaaagggaagatgtccagaaaaagacctttaccaagtgggtgaacgcacaattttccaagtttgggaagcagcatattgaaaacctgtttagcgatctgcaggatggcaggcggcttctcgatctcctcgaaggccttactgggcaaaaacttccaaaggagaaaggttccacccgagtgcatgctctgaataatgtcaacaaagcactgagagtgctgcagaacaacaacgtcgacctggtgaatatcggatcgactgacattgtggatggtaaccacaaactgaccctcggattgatctggaatatcattctccattggcaagtcaagaatgtcatgaagaacattatggcaggactccaacaaaccaactcggaaaagattcttctgagctgggtgcggcaaagcaccagaaactacccgcaggtgaatgtgattaacttcacgacctcctggtcggatggtcttgcactcaacgcgcttattcattcgcacagacctgatctgttcgattggaactccgtcgtgtgtcagcagtcagcaacccagaggctggaacacgcctttaacatcgcacgctaccagctcggaatcgagaaacttttggatcccgaagatgtggataccacctaccctgacaagaagtcaattctgatgtacattaccagcctttttcaagtccttcctcaacaggtgtccatagaggcaattcaggaagtcgaaatgcttcctaggcctcccaaggtgactaaagaagaacattttcaactgcatcaccaaatgcattactctcaacaaataaccgtctcccttgcccaaggatacgagcgtacttcatcccctaagcctaggtttaagtcgtacgcttacacccaggcggcatacgtgacgacgtcagatccaacgagatcaccattcccatcgcagcatctggaagcacctgaagataagtcctttggttcgtcacttatggagtcagaagtgaaccttgatcgttaccaaaccgcgcttgaggaggtcctgtcgtggctgctctcggcagaggataccctgcaagcacagggagaaatttccaacgacgttgaggtggtgaaggatcaatttcatactcatgagggatacatgatggatctgaccgcacatcaaggccgtgtgggcaacatcttgcaactgggtagcaaacttattggaaccggaaagctgagcgaagatgaggaaacggaggtgcaggagcaaatgaatctgctgaactcccgctgggaatgcctgagagtggcaagcatggaaaagcaatccaatcttcacagagtgctcatggatctgcaaaaccagaaactgaaggagctgaatgattggcttaccaagaccgaggaacgtacccggaagatggaagaggagccactggggcctgatcttgaagatttgaaacgtcaagtgcaacaacacaaggtccttcaagaggacctggagcaagaacaagtacgcgtaaactcgcttacccacatggtggtcgtggtcgatgagagcagcggcgatcatgcaaccgccgcgctcgaagagcagctgaaagtgcttggtgaccgctgggcaaatatctgtcgctggactgaagatcgttgggtgcttttgcaggatatactgctcaagtggcagagactgactgaagaacagtgtctgttctcagcatggctctcggaaaaggaggatgcagtcaacaagattcacactactgggttcaaggaccaaaatgaaatgttgtccagccttcaaaagctcgcagtcctcaaggctgacctggaaaagaagaagcagtcaatggggaaactgtactcccttaaacaagatcttctctcaaccctgaagaataagtcagtcactcaaaagacggaggcgtggctggacaactttgccaggtgttgggataatcttgtccagaaactggaaaagagcactgcacagatctcgcaagcagtgaccaccacccagccgtcgcttactcaaaccactgtcatggaaaccgtcaccactgtgacgactagagaacagatcctcgtgaagcatgcacaggaagaactgccaccaccacctccacagaaaaaacggcagataaccgtggatactcttgaacgtctccaagaacttcaagaagcaaccgatgagctcgatctcaagctccgccaggcagaggtgattaaggggtcctggcaacccgtgggagacttgcttattgacagccttcaagaccatctcgaaaaggtcaaggcgctgagaggtgaaatcgcacctttgaaggagaatgtgtcacatgtgaatgatctggcgcggcagctcaccaccctgggcattcagctttccccctacaaccttagcacgctggaagatcttaacacgagatggaagctcctccaggtggcagtggaggatagagtgaggcaactccacgaggcacatcgggattttggccccgcatcgcaacacttcctgtcgacctccgtgcagggaccatgggaacgggcaatttcgcctaacaaagtcccttattacattaaccatgaaacccaaactacctgctgggatcatccaaagatgaccgaactctaccaatcacttgcagatttgaacaatgtgcggttttccgcgtaccggaccgcaatgaagctccgaaggcttcagaaggcgctctgtctggatcttctgtccctgtctgcggcatgtgacgcccttgatcaacataatcttaagcaaaatgatcaacctatggatattctccagatcataaactgtctgaccactatttacgatcgtctcgaacaagaacataacaatcttgtgaatgtgccactgtgcgtcgatatgtgtttgaactggctccttaatgtgtacgatactggacgcactggtagaatcagagtgctgagctttaagactgggatcatctcactctgtaaagcacacctcgaggacaaataccgctacctgttcaagcaagtggcgtcgtccacgggcttttgtgatcagagaaggcttggcctgctgcttcacgattcgatccaaatccctcgacaactcggcgaagtggccagctttggcggttcaaacattgaaccatcggtgcggtcctgcttccaattcgcaaataacaagccggaaatcgaagcagccctgtttctggattggatgcggctggagcctcagtcgatggtgtggcttcccgtactccatagagtcgcagcagcagagactgccaagcatcaggccaagtgtaacatatgtaaggagtgtccgatcattggttttcgctacaggtcgctcaaacacttcaattacgatatttgccaaagctgctttttcagcggccgcgtggcgaaagggcacaagatgcattatcccatggtggaatactgcactcctactacttccggggaagatgtcagagatttcgcaaaggtcttgaagaacaaatttcggaccaaacgctattttgcaaaacacccgaggatgggttaccttcctgtgcagactgtccttgaaggggacaatatggagactgataccatg

SEQ ID NO: 251320 - DNA, 3591 bp, synthetic construct
  misc_feature 1..3591: note = Description of Artificial Sequence: Synthetic coding sequence
  source 1..3591: mol_type = other DNA
atgctctggtgggaagaagtcgaggattgctatgagcgagaagatgtacagaaaaaaacatttactaaatgggttaacgcacagttttctaaattcggaaaacagcacatcgaaaacctgttcagtgatctgcaagacggacgacggctgctagacctcttagagggactcacagggcagaaacttccaaaggaaaaggggtccacaagggtccatgcccttaataacgtaaacaaggcactccgcgtcttgcagaacaacaacgtcgacctcgtgaacatcgggtccacagatatagtcgatgggaatcacaaactgactctcgggttgatctggaacataatattgcattggcaggtgaaaaacgttatgaaaaatataatggcaggacttcagcagacaaatagtgagaaaatccttctctcctgggtccggcagtctactaggaactatccacaggtgaacgtgataaattttactacatcatggtccgatgggctcgcccttaatgccctcatccattctcacaggcctgatctgtttgattggaactccgtagtctgccaacagtcggccactcagcggttagaacacgcctttaacatagcccggtatcagctggggatagaaaaactccttgatcccgaagatgtcgatacaacataccccgataaaaaatccatcttaatgtacatcacatcactatttcaagtgcttccccagcaggtctctatcgaggccatccaggaagttgaaatgcttccacgaccacctaaagtgacgaaggaggaacacttccagctacatcaccagatgcactactcacagcagataactgtgtccttagcccaggggtatgaaaggactagttctcccaaacctcggtttaagagttatgcctatacacaggcagcttatgttacaacttcggatcctactaggtctcccttcccctctcagcatttagaagccccagaagataaatccttcggatctagtctaatggagagtgaagtaaatctcgaccggtaccagacagctctagaagaagtcctctcttggctactgagtgcagaagacacactccaggcccagggagagataagtaacgatgttgaagtggtcaaagatcagttccatacacacgaaggatacatgatggatctgactgctcaccagggaagggtagggaatatactccagcttgggtctaagctcatagggactggaaaactgtccgaggatgaagaaacagaagtacaagaacagatgaacctcttaaactctcggtgggaatgtctccgagtagcttctatggaaaaacagagtaaccttcatagagtccttatggatctacagaatcagaaactcaaagaattaaatgattggctcactaaaacagaagaacgaacacggaaaatggaagaagagcctcttggaccggatttagaagacctgaaaagacaggtacaacagcacaaggtcctgcaggaggacttggaacaggaacaggtgagagtgaactccctcacacatatggtcgtagtcgtggatgaatcttccggagatcacgccactgcagcactggaagaacagctcaaggtccttggagataggtgggcaaacatctgtcgctggactgaagatcggtgggtgctgctgcaggacatactgctgaagtggcagcgcttgacagaagaacagtgcctcttttcggcatggttatccgaaaaagaagatgcagtgaacaaaatacatactacagggttcaaagatcagaatgaaatgctgtcttcccttcagaaactcgcagtgctcaaagccgatctggaaaaaaaaaaacagtccatggggaaattatactcactcaaacaggatctcctgagtacactcaagaacaaaagtgtgacacaaaaaactgaagcctggctcgacaacttcgcaaggtgctgggacaatcttgtgcagaaactggaaaagagtactgcacagatctctcaggccgtcacaacaactcagcccagtttaacacagacaactgtaatggaaacggtaacaactgttacaacacgagaacagatactggtgaaacatgctcaggaagaactccccccaccaccaccacagaagaaaagacagatcactgtagatactctggaaagactgcaggaactccaggaagcgactgacgaacttgatctcaaattaagacaggcagaagtgataaagggatcttggcagcccgtaggggaccttctgattgacagtctccaagatcacctcgaaaaggtcaaagctttacggggagagatagcaccattgaaagaaaatgtttcacacgttaatgatctagctcgccagctcacaacactgggaatacagctttccccttataatttatctactctcgaagatcttaacacacgatggaaactgctacaggttgccgttgaagatcgagtccggcagcttcacgaggcccaccgggattttgggccagcttcacagcatttcctttccacgtccgtgcagggaccctgggaacgagcaatctccccaaataaagtgccatattatatcaaccacgagacacagactacatgctgggatcatcccaagatgacagaactctatcagagtcttgctgatctgaacaacgtgaggttctctgcctatcggacagctatgaaactccggaggctacagaaagcactatgcctggatctgttatctctgtctgccgcatgtgatgcacttgatcagcacaaccttaaacagaatgatcagccaatggatatcctgcagatcataaactgtctcactactatttacgatcgactagaacaggaacacaacaacctcgttaacgtgcccctgtgcgttgatatgtgcctgaattggctcttgaacgtgtatgatacagggcgcactggaaggatccgggtgttatcattcaaaacaggaataatatccctctgcaaagctcatctggaagataagtaccggtatctgttcaaacaggtggctagttctacagggttttgtgatcagcgccgtctggggctgcttttacatgactcaatacagataccccggcagttgggggaagtggcatcgttcggagggtctaacatcgaacccagtgtcaggtcttgtttccagtttgctaataacaagccagagatcgaagcagctttgtttttagactggatgagattggaacctcagagtatggtctggctccccgtcctccaccgagtggccgcggcggaaacagctaaacaccaggccaagtgcaacatttgcaaggaatgtcccatcataggatttcgctacagatctctgaaacactttaattatgatatatgccaatcgtgttttttttcaggaagagtggcaaaggggcataaaatgcattaccccatggtagaatattgcacacctactactagtggggaagatgttagagattttgccaaagttctcaaaaacaaattccggacaaaacgctatttcgccaaacaccccagaatgggatacctcccagtgcagactgtgttagaaggagataacatggaaacagacacaatg

SEQ ID NO: 251321 - DNA, 3591 bp, synthetic construct
  misc_feature 1..3591: note = Description of Artificial Sequence: Synthetic coding sequence
  source 1..3591: mol_type = other DNA
atgttgtggtgggaagaggtcgaggactgttatgaaagggaagatgttcagaaaaagacgttcaccaagtgggtgaacgcccaattctcaaagttcgggaaacaacatatcgagaacctgttctccgaccttcaagacggacgaaggctcctggaccttctggagggactcacgggccagaaattgcctaaggaaaagggcagcaccagggtgcatgccctgaataacgtgaacaaggctctgcgggtgctgcagaacaacaatgtggacctcgtcaatatcggatcaactgatatcgtggatggaaatcacaagctgacgctgggcctgatttggaacatcatcctgcactggcaagtgaagaacgtgatgaagaatatcatggccggcctgcagcaaactaattccgaaaagatcctgctttcctgggtacggcaatcgacccgcaactacccgcaggtgaatgtcatcaacttcaccacctcctggtcggatgggctggcccttaacgcactgatccattcacaccggccggacctgttcgactggaactccgtcgtgtgtcagcagtcggccactcaaaggctcgaacacgcgtttaacatagcgaggtaccagctcggcatcgaaaagctgctcgacccggaggacgtggacactacctacccggacaagaaatccatcctgatgtacattacctccctgtttcaggtgttgccgcaacaagtctcgatcgaagcgatccaagaggtggagatgcttccgcgccctcccaaagtgactaaagaagaacatttccagctgcaccaccaaatgcattactcacaacaaattactgtgtctctggcccaggggtacgagcgcacttcgtcccctaagccgagattcaaaagctacgcatacacgcaggctgcgtacgtcaccacgtccgacccaacccggagcccgttcccatcccaacacctggaggcgccagaagataaatcatttgggagctcactcatggaatcggaagtgaatctggacaggtaccagaccgcgttggaggaggtgctgagctggctcctctcggcagaagatacgcttcaagcccagggagaaatttcaaacgatgtggaagttgtgaaggatcaattccatacccacgagggatacatgatggaccttactgcgcaccagggacgagtgggtaatatcctccagttggggtcgaagctcatcggtaccggaaaactttccgaggacgaggaaaccgaggtgcaggagcaaatgaacctcctgaactcccggtgggaatgcctgcgcgtggcctccatggagaagcagagcaatttgcaccgggttctgatggacctccagaatcagaagctgaaggaactgaatgactggttgaccaaaacggaggaacgcacccggaaaatggaagaagagccgcttggaccggatttggaggaccttaagcggcaagtgcagcaacacaaagttctgcaggaggacctcgagcaagaacaagtgcgggtgaactccttgacgcatatggtcgtcgtggtggatgagtcctcaggcgatcatgccactgctgctttggaagaacagttgaaagtgctgggcgataggtgggcgaacatttgtcggtggactgaggaccgctgggtcctgctccaagatatcctcctcaaatggcagaggctcaccgaggagcaatgcctgttttctgcctggctctcggagaaagaggacgctgtgaacaaaatccataccactgggttcaaggaccagaacgagatgctgagctcacttcagaagctggccgtgctcaaggcggatttggagaagaagaagcaatccatgggaaagctgtacagcctgaaacaggatctcttgtcaactttgaaaaacaagagcgtgacccagaaaactgaggcgtggctggataacttcgcgcggtgctgggacaatcttgtccagaaactggaaaagtcaactgctcagatctcccaggccgtgacgactactcagcctagcctgacccagactactgtgatggaaaccgtgactactgtcaccaccagggagcagatcctggtcaagcacgcccaggaagaacttccgcctcctccgccccagaaaaagagacaaattaccgtggataccctggagcggctgcaggaactgcaagaagccaccgacgaactcgacctcaagctgagacaagctgaggtgatcaaggggagctggcagccagtgggggacctgctgatcgactcgctgcaggaccacttggagaaggtgaaggcactgcgaggcgagatagcccccctcaaggagaatgtctcacatgtgaatgacctggcccgccaactcaccaccctgggaatccagctgagcccgtacaatctgtccactctggaagatctgaacaccagatggaagctcttgcaagtcgccgtggaggaccgggttcggcagctgcatgaggcacaccgcgattttggacccgctagccaacactttctctcgacctcggtgcagggaccgtgggaacgcgccatcagcccaaataaggtgccgtactatatcaaccacgaaactcagaccacttgctgggatcatccaaagatgaccgagttgtaccagagcctggcggacttgaataacgtgcgcttcagcgcataccgcaccgcgatgaagttgagacggctgcagaaagccctctgtctggacctcctgtccctctccgcggcctgcgatgccctggaccaacataatcttaaacagaacgatcagccaatggacattctccagatcatcaactgcctgaccaccatctacgacagactcgagcaggagcacaacaacctggtgaacgttccgctttgcgtagacatgtgcctcaactggctgctgaatgtgtacgataccggccgcactggacgcattagggtcctgtcgttcaaaacgggaatcatctccctgtgcaaagcccaccttgaggacaaataccgctatctgtttaagcaggtggcttcctccaccggcttctgcgatcagagacggttgggactgctgctccacgattcgatccaaatccctcgccagcttggagaagtggccagcttcggaggatccaacatcgagccgtctgttcggtcctgcttccaattcgccaacaacaagcccgagattgaggccgcactctttctcgattggatgcggctcgaaccccagtccatggtatggcttccagttttgcaccgcgttgctgccgcagagactgcgaagcaccaagccaagtgcaacatttgcaaggaatgtcctattatcggttttagatacagatccctcaaacatttcaattacgacatctgccaaagctgctttttctcgggtcgggtggcaaagggacacaagatgcattacccaatggtcgaatactgtaccccgacgacttcaggagaggacgtgagggactttgctaaagtgctgaagaataagttcaggactaagcgctactttgccaagcacccccgcatggggtacctcccagtccagacggtcctcgaaggagacaatatggagactgacactatg

SEQ ID NO: 251322 - DNA, 3591 bp, synthetic construct
  misc_feature 1..3591: note = Description of Artificial Sequence: Synthetic coding sequence
  source 1..3591: mol_type = other DNA
atgttatggtgggaggaagtggaagattgctatgaaagggaagacgtccagaaaaaaacattcacaaaatgggtaaacgcacaattctcaaaattcggaaagcagcatatagaaaacctctttagtgatctgcaggatgggagaaggctgctggatctgctcgaagggctaacgggacagaaactgcctaaagagaaagggtctactagggttcacgccctaaacaacgtaaacaaggctttacgcgtgctacagaataataatgttgatctagtgaacataggatcgacagatattgtagatgggaatcataaactcacactgggactgatctggaacataatactacactggcaggttaaaaacgtcatgaaaaacataatggctgggcttcagcagactaactcggaaaaaatcctcctctcctgggtgaggcagtctacaagaaattatccacaggtcaatgtgatcaactttacgacatcttggtctgacggactggcgctcaatgctcttatacactctcatcgccccgatctgtttgattggaattcagtggtgtgccagcagtcggctacacaacgacttgaacatgcctttaatatagcacggtatcagctggggattgaaaaactacttgatcctgaagatgtggatacaacttatcccgataagaaaagtattcttatgtatatcacttccttgtttcaggtgctccctcagcaggtttcaattgaagcaatccaggaagtggaaatgctgccccgcccacctaaagtgactaaagaagagcacttccagctgcaccaccagatgcactactctcagcagatcacagtgtccctggctcagggatatgaaaggacatcatcgcccaaaccacgctttaagtcctatgcttatactcaggccgcttacgtcacgacatcggatcccacacgatcccctttccctagtcagcatcttgaagcccccgaagataaatctttcgggtcttctttgatggaatccgaagtaaatctcgatagatatcagacagctctggaggaagtcctatcatggctcctgagtgcggaagatactcttcaggctcagggggaaatatccaatgatgtagaagtcgtcaaagatcagtttcatactcatgaagggtacatgatggacctcacagcccaccagggacgggtcggaaacattctgcagctgggatctaaactgattgggactggaaaactctctgaagacgaagaaactgaagtgcaggagcagatgaatttgctcaatagtaggtgggagtgtctgagggtggcaagtatggagaaacagagtaatcttcacagggttttaatggatctacaaaatcagaaactaaaagaactaaacgattggctgactaaaacagaagaaagaactcggaaaatggaggaggagcccctggggcctgatctcgaagatttaaaaagacaggtccagcagcataaagtcctgcaggaagatctggagcaggaacaggtacgcgttaacagtctcactcacatggtggttgtggtcgatgaatcatctggggatcatgcaactgctgctttggaagaacagttaaaagtgctcggagatcgatgggccaacatttgcaggtggactgaagacaggtgggtacttctgcaggatattcttctgaaatggcaacggctgacagaggaacaatgcctttttagtgcgtggctctccgaaaaagaagatgctgtgaacaagattcatacaactggatttaaagatcagaacgaaatgctctcatcacttcagaaattggcagtcctcaaagccgatcttgagaaaaaaaaacaatccatgggaaaattgtattctcttaaacaggatcttttgtctactctcaaaaacaaatccgtgactcagaaaactgaggcatggctcgataacttcgcccgctgttgggataatctggtccagaagctagaaaagtccacagcccagattagtcaggcagttactactacacagccatctctgacacagacaactgtgatggaaacagtcactacagtgacaacacgggaacagattctcgtaaaacatgcccaggaagaacttcctcccccacctccccagaaaaaacgacagatcactgtagatactctggaacgcctacaggaactccaggaagccacagatgaacttgacctcaaacttcggcaggcagaagtgataaaagggtcttggcagcctgtgggagatttgctgatcgactctctccaggatcacctcgaaaaagtaaaagcacttcggggggagatagctcctctaaaagagaatgtatcacacgtgaatgatcttgcacggcagctcactactcttggaatacagctatccccatataaccttagtactttagaggatctcaatacacgatggaagctgctgcaggtggcggtagaagatagagtgcggcaactccacgaagcccatagggactttggacccgcatctcaacactttctgtcaacaagtgtgcaggggccttgggaacgcgccatttccccaaacaaagtgccttattatatcaaccacgaaacacagactacttgttgggatcacccaaagatgacagagctctatcagtcccttgccgatcttaataacgtcaggttctctgcttataggacagccatgaaactccgccgcttacagaaagccctttgtctcgatcttctgtcactgagtgcagcatgtgatgctttggaccagcacaatctcaaacagaatgaccagcctatggacatcctccagatcattaactgtcttactacaatttacgatcggctagaacaggaacataacaatctcgtaaatgttcccctgtgcgtggatatgtgcttaaactggctgctcaatgtatacgacacagggaggacaggacgaatccgggtcctcagtttcaagactggaatcatatctttatgtaaagcacatctggaagataagtaccggtatcttttcaaacaggtcgcgagttctacagggttctgcgatcagagaaggctcgggcttctgctgcacgacagtattcagatccctagacagcttggggaagtcgcatccttcggaggatctaacatcgaaccctctgttaggtcctgcttccagttcgcaaataataaacccgaaatagaagctgctctcttcctcgattggatgcggctcgaaccccagagtatggtgtggctgcccgtgcttcaccgagtggccgcagcagaaactgccaaacaccaagctaaatgtaatatctgcaaagaatgcccaatcataggattccggtatcggtcccttaagcactttaactatgatatttgtcaatcatgcttcttcagtggacgggtagctaaaggacacaagatgcactatccaatggtcgaatattgcacgcccacaacttcaggagaagatgtgagggatttcgccaaagtccttaaaaacaaattccggacaaaacgatattttgcgaaacatccaagaatggggtacctgccagtgcagacagtgctggaaggagataatatggaaacagatacaatg

SEQ ID NO: 251323 - DNA, 3591 bp, synthetic construct
  misc_feature 1..3591: note = Description of Artificial Sequence: Synthetic coding sequence
  source 1..3591: mol_type = other DNA
atgctgtggtgggaagaggtggaggactgctacgagcgagaggacgtgcaaaagaaaaccttcaccaaatgggtgaacgctcagttcagcaagtttggaaagcaacacattgagaatcttttctccgacctgcaggacggccggcgcttgctcgatttgctggagggactgactggacagaaactgcctaaagaaaagggctcgaccagggttcatgcgctgaacaacgtgaacaaagccctgcgcgtactgcaaaacaacaatgtggacttggtgaatatcggttcaaccgatatcgtggacggaaatcacaagctgacgctcgggttgatctggaacatcatcttgcactggcaggtcaagaacgtgatgaaaaacatcatggctggcctgcagcaaactaactccgaaaagatcctgctgtcctgggtgcggcagtcgactcgaaactaccctcaggtgaatgtcatcaacttcaccacctcctggtcagatggactcgcactgaacgccctcatccactcgcataggcctgatctcttcgactggaactcagtcgtctgccaacaatcagccacccaacggctggaacacgcttttaacatcgctagataccagctggggatcgaaaagctgctggacccggaggacgtggacaccacctacccagacaagaagtccatcctgatgtacattacctcgttgtttcaagtgctgccgcagcaagtgtcgatcgaggcgattcaggaagtggaaatgctgccacggccgccgaaggtcaccaaggaggagcattttcagttgcatcaccagatgcactactcacagcaaatcacggtcagcctcgcccaaggttacgaacggacctcgagcccaaagccaagatttaagtcgtacgcttacacccaggcggcatacgtgactacttcggaccctactaggagcccgttcccttcgcaacacctggaagcaccggaggacaagtcattcggaagctcactgatggaatcggaagtgaacctggaccgctaccagacggcgttggaagaggtcttgtcatggctcctgtcggccgaagatacgctccaagctcagggagagatctccaatgatgtcgaggtggttaaggaccagttccatactcatgagggctacatgatggatctcaccgcccaccagggccgagtgggtaatatcctgcaactcggatctaaattgatcggtactgggaagctctcagaggatgaagaaactgaagtgcaagaacagatgaacctgctgaattccaggtgggaatgcctgcgcgtggcctcgatggaaaaacagtccaacctgcatcgggtgctgatggatctgcaaaatcaaaagctgaaggagcttaatgattggctgaccaaaactgaagagcggacccgcaagatggaagaagagcctctcggaccagatcttgaggacctcaaacgacaggtgcagcagcacaaggtgctccaggaggatcttgaacaagagcaagttagggtgaactccctgacccacatggtggtagttgtggacgaatcctcaggggaccacgctacggcagcgctggaagagcagctgaaggttttgggagataggtgggcgaacatttgccggtggaccgaagatcgctgggtattgttgcaagacatcctcctcaagtggcaaagactgactgaggagcaatgtctcttctcggcgtggctgtccgaaaaggaggatgcggtcaacaagatccacaccaccggattcaaggatcaaaacgagatgctctcctcgttgcaaaaactggccgtgcttaaggccgatctggagaagaaaaaacaatctatgggaaagttgtactccctgaagcaggacctgctctcgaccctcaagaacaagtcagtcacgcagaaaactgaagcatggctggacaacttcgcaagatgctgggataacctcgtccagaaattggaaaagtccactgcacaaatctcgcaggctgtcaccacgacgcagcccagcctgacccagaccaccgttatggagactgtcacgactgtgaccactcgggagcagatcctggtgaaacatgctcaggaggaactgcctccgccacccccacaaaagaaaagacagatcaccgtggacacccttgagcggctccaggagctccaggaggccactgatgaactcgatttgaaactcagacaggcggaggtgataaagggttcgtggcagccggtgggcgacctcctcatcgatagcctgcaggaccacctggagaaagtgaaggcccttcggggcgaaatcgctcccctcaaggaaaatgtgagccacgtgaatgacctggctaggcaactgaccaccctcggtattcagctgtccccttacaacttgtcgacgctggaggacctgaacacccgctggaaactcctccaagtggcggtggaggaccgcgtccggcagctccacgaagcacatcgcgacttcggtccggctagccaacacttcttgtcgactagcgtgcagggaccgtgggagcgggccatcagccccaacaaggttccgtattacattaatcacgagactcagaccacttgttgggaccacccgaaaatgacggaactctaccagtccctggcggacctgaataacgtcaggttctccgcgtaccgcactgctatgaagctgcgcagactgcagaaggccctctgccttgacttgctgagcctcagcgcagcatgcgacgccctggatcagcataatctgaagcagaatgaccagccgatggacattcttcagatcatcaattgcctgactactatctatgacagattggaacaggaacataacaacttggtgaatgtgccgctctgtgtcgacatgtgtctcaactggctgctcaacgtctacgatactggacggaccggccgcatccgcgtgctgtcatttaagactgggatcatctcactgtgtaaagcccaccttgaggacaagtacagatacctgttcaagcaggtagcgtccagtaccgggttctgcgaccagcgcaggctgggactgcttcttcacgattcaatccagattcctcgccagctgggcgaagtggcatcgtttggcggctccaacatcgaaccgtccgtccgcagctgctttcagttcgcgaacaacaaacctgaaatcgaagctgcccttttccttgactggatgcgactggaaccgcaatccatggtctggttgccggtccttcatcgggttgccgctgcagaaactgcgaagcatcaggccaaatgcaacatctgcaaggagtgcccaatcattggattcaggtatcgctcacttaagcatttcaattatgatatttgccaatcctgctttttctcgggccgcgttgccaagggccacaagatgcattacccaatggtggagtactgtactccgactaccagcggtgaagatgtgcgcgacttcgcaaaagtcctcaaaaacaagttcagaacgaagcgttacttcgctaagcacccccggatgggataccttccagttcaaaccgtgttggaaggcgacaatatggagacggataccatg

SEQ ID NO: 251324 - DNA, 3591 bp, synthetic construct
  misc_feature 1..3591: note = Description of Artificial Sequence: Synthetic coding sequence
  source 1..3591: mol_type = other DNA
atgctgtggtgggaggaggtggaggattgctacgagagggaggatgtacaaaaaaagacttttactaagtgggtgaacgctcagttctctaagttcggcaaacagcacatagaaaatttgttcagcgatctccaggacggacgccgtctgttggacctgcttgagggcctgacgggccagaaattacccaaagagaaaggatccacacgcgttcatgcactcaacaatgtcaataaggcactccgggtgttgcagaataataacgtggacttggtgaacatcggtagcaccgatatagtcgatgggaaccacaaacttaccttaggactaatatggaatatcattttgcattggcaggtgaaaaatgttatgaagaatattatggcgggcctgcagcagaccaatagcgagaaaattctcctctcgtgggtgcggcagagtacccggaactatcctcaggttaatgtgatcaattttacaacgtcttggtctgatgggttagccctcaacgctctgatacactcccaccggcctgatctgtttgactggaacagtgtagtttgccaacagagtgctacgcagcgtttggagcatgccttcaacattgcccgctaccagctaggaattgaaaaacttctggatcccgaagatgtggatacaacgtacccagataagaagtctattcttatgtatattactagtctgttccaagttctcccccagcaagtgagcatagaggccatccaggaagttgagatgttgccacgcccacccaaagtgacaaaggaggagcacttccagctacatcatcagatgcattacagtcaacaaatcacagtctcactggctcaagggtatgaacgcacgtcctcacccaaaccccgatttaaaagctatgcatatacacaggctgcctatgttaccacttccgaccctacacgcagtcctttccccagccagcaccttgaggcgcctgaggataagtcattcggctcttctctgatggagtcagaggtgaatctggaccgttaccagacagcacttgaggaagtactatcctggttactatccgcggaagacacactgcaggctcagggtgaaatcagtaacgacgtcgaggtagttaaggaccagtttcatactcacgaagggtacatgatggacctaaccgctcaccagggtcgcgtggggaacatccttcagctgggttctaaacttataggcaccggaaaactctcagaggacgaggagaccgaggtgcaagagcagatgaacctgcttaattcccgttgggaatgcctcagggtggccagcatggaaaagcagagcaacctgcatagagttctgatggatctccagaaccagaaactcaaggagctgaacgactggctgaccaagaccgaagagcgcacccgtaaaatggaagaggagccacttggacctgatcttgaggatttgaaaagacaagtccaacaacacaaggttttacaggaggatctcgaacaggagcaggtgcgtgtgaattcactcactcatatggtggttgtggttgatgagagtagtggcgatcacgcaacagcagctcttgaggaacagctcaaagtgctgggcgaccggtgggccaacatctgtcgatggaccgaggatcgctgggtcttgctgcaggatattctcttgaagtggcagcgccttacagaggagcagtgtctgttctctgcctggctctcagaaaaagaagacgctgtaaataagatccataccacgggcttcaaggaccaaaatgagatgttgtcctctctccagaagctagccgttttaaaggcggatctggagaagaagaagcagtctatgggaaaactttacagcctcaagcaggatctgctgtctaccctgaaaaacaagtctgtcacccagaagactgaagcttggctggacaattttgctcgctgctgggacaacctggttcagaaactggagaaatcgactgctcagatcagtcaagctgtaactactacacaaccatctctgacgcagacaacagtgatggaaaccgttacaacagttacaacacgcgagcaaatcttggtcaagcacgcgcaggaagaactgcctccacctccacctcagaaaaaacgacagattaccgtcgatacacttgaacggctacaagagctgcaggaagcgactgacgaattggacctgaagctgagacaggcagaagtgataaagggcagctggcagcccgtaggagacctgttgatcgatagcctgcaggaccacctggagaaggtgaaggctctccgcggcgagattgctcccctaaaagaaaatgtgagccacgtcaacgacctggcaaggcaactgacgactctcggcattcagctgtccccctataacctctccacgctagaggatctgaacacaaggtggaaacttcttcaggtggccgtggaggatcgcgttagacaactgcatgaagcacacagagatttcggccccgcttcgcagcacttcctgagtaccagcgtgcagggaccatgggaacgggccattagccccaataaagtcccttattatatcaatcatgagacccagaccacgtgttgggaccacccaaaaatgacggaactgtatcagtcactggctgacctcaataatgtcaggttcagcgcctataggaccgccatgaagctgcggagactccagaaagcattatgtctggatttgctgagcctgtcagctgcttgtgacgcgctcgatcaacataaccttaagcaaaatgaccagcctatggatatcctgcagataatcaattgcttaacgactatttacgatcgccttgagcaggaacataacaatctggtcaatgtgccgctgtgtgttgatatgtgcctcaactggctcctgaacgtttacgacacaggccggactggacggataagagtactgtcttttaagactggaatcataagcttgtgcaaagcccacctcgaagataaataccggtatctcttcaaacaggtagcctcgtctacaggtttttgtgatcagcgccggctggggctgctgctgcatgattccatccagattccacggcaactgggggaggttgccagcttcggggggtccaacatcgagcccagcgtgcgttcctgtttccagtttgccaataataaaccggaaatcgaagcagctttgtttctggactggatgcgtcttgagcctcagagtatggtgtggcttcctgtcctgcatagggtcgccgcagcagaaacggcaaagcaccaggccaaatgcaacatttgtaaggagtgccccatcatcgggttcaggtaccgctccctcaaacattttaactacgatatttgccaatcttgcttcttcagcggaagggttgccaaaggccataaaatgcactatccaatggttgaatactgcacgcctaccacctcgggcgaggacgtgcgagatttcgccaaggtgctcaaaaacaagttccgcacgaaacggtattttgcaaagcatcctaggatgggttacctccccgtacagaccgtcctagagggagataacatggaaacggacacgatg

SEQ ID NO: 251325 - DNA, 3591 bp, synthetic construct
  misc_feature 1..3591: note = Description of Artificial Sequence: Synthetic coding sequence
  source 1..3591: mol_type = other DNA
atgttgtggtgggaagaggtggaagattgttacgaaagagaagatgtgcaaaagaaaacttttactaagtgggtgaacgcacaattctcgaagtttgggaaacagcatattgagaaccttttctcagatctgcaggatgggcgcagacttctcgatctgctcgagggcctgaccggacagaaattgccgaaggaaaagggatcgactcgggtccatgcgctgaataacgtgaacaaggccctgcgagtgttgcagaataacaacgttgacctcgttaacatcggatcgactgatatcgtggacggaaatcacaaactgactctgggattgatctggaatatcatcctgcactggcaagtgaagaacgtgatgaagaatatcatggctgggctgcagcaaactaattccgagaaaatcctcctgtcctgggtccggcagtcgaccagaaactatcctcaggtgaatgtgatcaacttcactacttcatggtccgacggcctggctctcaacgccctcattcattcacatcgaccggacctgtttgactggaactcagtggtgtgccagcaatcagcgacccagagacttgaacacgccttcaacatcgcacgctaccaactgggaattgaaaaacttctggacccggaagatgtggacactacctacccggataagaagagcatccttatgtacatcacgtcgctgtttcaggtcttgccgcaacaggtgtccatcgaggccatccaggaagtcgagatgctgccgcgcccgccgaaggtgaccaaggaagagcacttccagctgcaccatcagatgcattactcccaacagatcaccgtatcactggcacagggctatgaacggacctcgtccccaaagccgaggttcaagagctacgcctacactcaggccgcttacgtgactacctcggatccgacgaggtcgccgttcccgtcccagcatctggaagcaccggaggacaagagcttcggatcgtccctgatggaatcagaggtgaatttggaccgctaccagaccgccctggaggaggtgctgtcctggctgctttccgcggaggacaccctgcaagctcagggcgagatttcaaatgacgtcgaagtggtcaaagatcagttccacacccacgaaggatatatgatggacctgactgcacatcagggaagggtggggaacatccttcagcttggaagcaagctgatcgggaccggcaagctgtccgaggacgaagaaactgaagtgcaggaacagatgaacttgctgaatagccggtgggagtgcctccgggtggccagcatggagaagcagtccaacttgcaccgggtcctgatggatctccaaaaccagaagctgaaggagctgaacgactggctgaccaagacggaggagcggacccgcaagatggaggaggaaccgctgggaccagacctggaggacctcaaacggcaggtgcagcagcacaaagtgttgcaagaggacctggaacaggagcaggtgagagtgaacagcctcacccatatggtcgtggtcgtggacgaatcgtcgggcgatcatgccactgccgccctggaagaacagcttaaggtcctcggagatcgctgggctaatatctgtcgctggaccgaagatcgatgggtccttctccaagacattttgttgaagtggcaaagactgaccgaagaacagtgcctgttctccgcgtggctgtcggaaaaggaggacgctgtgaacaagatccataccactgggtttaaagaccagaacgagatgctgtcctcgttgcagaagctggccgtcctgaaggctgatctggagaagaaaaagcaatccatgggtaaactgtactccctgaagcaggatctgttgtccactctcaaaaacaaatccgtgacccagaaaactgaggcctggctcgacaatttcgcccggtgttgggataatctcgtgcagaagctcgagaaatccaccgctcagatttcccaggcggtcaccacgacccagcctagcctgacccagaccactgtcatggaaaccgttactactgtgaccaccagagaacagatcctcgtgaaacatgcgcaggaagagctgccgccaccaccccctcaaaagaagcggcagattaccgtcgacaccctggaacgcctgcaggagttgcaggaagcgacggacgagcttgacctgaagctccgacaggcagaggtgataaagggctcctggcagcctgtgggcgatttgctgatcgactccctccaggatcacctggaaaaggtgaaggccctccggggagagatcgcgcctctgaaagaaaacgtgtctcacgtcaacgacctcgctcggcaactgaccaccctggggatccagctgtcaccctacaacctgagcactctcgaggatctgaatacccggtggaagctcctccaagtggcggtggaggatcgggtgcgccaactccacgaagcacaccgggacttcggaccggcctcccaacactttctgagcacctcggtacagggaccatgggaacgggcgatctcaccaaataaggtgccttactacatcaatcacgagactcaaactacctgttgggaccatcctaagatgactgaattgtaccagtccctggccgacctcaacaacgtgcggtttagcgcctacaggaccgcgatgaagttgcgcagactgcaaaaggcgctctgcctcgacctgctgtcgctctcggcagcctgcgatgcccttgaccaacacaacctgaaacagaatgaccaacctatggacatcctgcaaatcattaactgcctcaccactatctacgatcggctggaacaggaacacaataatcttgtcaacgtaccactgtgcgtggacatgtgcctgaactggctccttaacgtctacgacactggacgaaccggaaggatccgggtgctgtcgttcaagactggtatcatctcgttgtgcaaggcgcacctcgaagataagtaccggtacctgttcaagcaggtggcctcgagcaccggtttttgcgatcaaaggcgtctgggacttcttctgcacgactcgatccagatcccgcgccagctgggggaagttgcctccttcggaggatccaacatcgagccttccgtccgctcctgtttccagttcgccaacaacaagccggaaatcgaagcggcactgttcctggactggatgcgcctcgagcctcagtcgatggtgtggttgcccgtcctgcacagagtggcggccgccgagacggcgaagcaccaggctaagtgcaacatctgcaaggaatgcccaatcatcggttttcgctaccggtcgctgaagcacttcaattacgatatctgtcagtcctgtttcttctcaggaagggttgcgaagggccataagatgcattacccgatggtggagtactgcacccccaccacctcgggcgaggacgtgagagacttcgccaaggtgctgaagaacaagttccggaccaagagatacttcgcgaaacatccacggatgggatacctgccggtgcagactgtgctcgagggcgacaatatggaaaccgacactatg

SEQ ID NO: 251326 - DNA, 3591 bp, synthetic construct
  misc_feature 1..3591: note = Description of Artificial Sequence: Synthetic coding sequence
  source 1..3591: mol_type = other DNA
atgctgtggtgggaagaggtcgaggactgctacgaacgggaggatgtccagaagaaaacttttactaaatgggtgaatgcacaattttccaagtttggtaagcagcacattgagaatcttttctccgatctgcaagatggccggcgccttctggatctgcttgaaggtctgacggggcaaaagctgccaaaggagaaggggtcgactcgagtgcatgcgctcaataacgtgaataaggccctgcgcgtgctgcaaaacaacaatgtggacctggtgaacattggaagcactgatattgtggatggtaatcataaactgacgttggggttgatttggaacattattctccactggcaagtgaagaacgtcatgaagaacatcatggccggcttgcaacagacgaattccgagaagatccttcttagctgggtccggcaatccacgagaaactacccacaagttaacgtgattaactttactacgtcgtggagcgatggcctcgcactcaatgcactgattcattcccatcgacctgatctctttgactggaactcggtggtgtgccaacagagcgcaactcaaagattggaacacgccttcaatattgcgagataccaactgggtatcgaaaagctccttgaccctgaagatgtggatactacttacccggacaagaaatcgattctgatgtacataaccagcctttttcaggtgcttccccagcaggtatctattgaggcaatccaagaagtggaaatgcttccacgtccacccaaagtgactaaggaagaacactttcaacttcaccatcaaatgcattacagccagcagattactgtaagcctggcacagggctacgagcgcacctcatcgccgaagcctagatttaagtcctacgcgtacactcaggcagcgtacgtcaccacgtcagacccaactaggtccccttttccttcacagcatctggaggcaccagaggataagagctttgggtcctcattgatggaatccgaagtcaacctcgatcgataccagaccgcacttgaagaggtgctgtcgtggctgctgtcggcggaagatactctccaggcacaaggtgaaatcagcaatgatgtcgaggtggtgaaagaccagtttcacactcatgaaggatacatgatggatcttactgcacatcaaggacgcgtcgggaatattctgcaactgggtagcaagctcattggtaccggaaaacttagcgaggacgaagaaactgaagtgcaagaacagatgaacttgcttaattcgcgctgggagtgtctccgtgtggcctccatggaaaagcaatctaacctgcacagggtgcttatggatctgcaaaatcagaagttgaaagaactgaacgactggctcaccaaaaccgaggaaagaacccgcaagatggaagaagaaccactgggaccagaccttgaggatctgaagcggcaagtgcaacaacacaaggtccttcaagaagatttggaacaagaacaagtgcgcgtgaactcccttactcacatggtggtggtcgtcgatgagagttccggtgaccatgcaactgcagcactggaagagcaacttaaggtgctcggcgacaggtgggcgaacatatgccggtggaccgaggatcggtgggtgctgctccaggacattcttctcaagtggcagagactgaccgaagagcaatgtctttttagcgcatggctgagcgaaaaagaagatgcagtgaacaagattcataccactggtttcaaggatcagaatgagatgctgtccagccttcaaaagttggccgttcttaaggctgacctcgagaaaaagaaacagtcaatgggcaaactttatagtcttaaacaagatcttctctccactcttaagaataagagcgtgactcaaaagactgaggcgtggctcgataactttgcaagatgttgggacaatcttgttcaaaaacttgaaaagtccaccgcgcagatcagccaagccgttactaccactcaaccctcgcttacccagactacggttatggaaacggtgaccacggtcactactagggaacagattcttgtgaagcatgcacaagaagagctccctcccccaccgcctcaaaagaaacgccagattactgtggataccctggaacgtttgcaagaactgcaggaggcaaccgatgagctcgatcttaagctgcggcaagcggaggtcatcaagggctcctggcaacctgtgggagatctgctcatcgatagccttcaggatcatcttgaaaaggtcaaggccctgaggggcgagatcgcaccactgaaggagaacgtctcgcacgtgaacgaccttgcacgccagctgacgacccttggaattcagctgtcgccttacaatctgtcaactcttgaagatctgaatactagatggaagctcctgcaagtggctgtggaagatcgagtgagacagcttcatgaggcacatagagattttggccctgcaagccagcacttcctttccacttccgtgcaggggccatgggagagagcgatcagcccaaacaaggtgccgtactacatcaatcatgagactcaaaccacttgttgggaccatccaaagatgacggagctttatcagtcgctcgcagatcttaacaacgttagattttcggcatacagaaccgctatgaaacttcgccgcctccagaaagccctttgcctcgatcttctgtcgttgtcggcagcatgcgatgccctcgaccagcacaaccttaagcaaaacgaccaacccatggacattctgcaaatcatcaactgtcttaccaccatatacgatcggttggagcaagagcataacaacttggtcaacgtccccctctgcgtggatatgtgtcttaactggcttctgaatgtgtacgacaccggtcgcaccggaaggatcagagtcctctcctttaagactggtatcatttccctgtgcaaggcacatctcgaggacaaatatcgctacttgtttaagcaagtggcatccagcaccggtttctgcgatcaacgcagactgggtctgcttctgcacgactcgattcagatccctaggcagctgggcgaagtggcctcatttggtggatccaacatagaaccttcggtgcgttcgtgtttccagttcgcaaacaacaagccagaaattgaggccgcactcttcctggactggatgagactggaacctcaatcaatggtgtggctccccgtccttcacagagtcgcagcagcagaaactgcaaagcatcaagcaaagtgcaacatctgtaaagaatgtccaattatcggatttagataccgctccctcaaacatttcaactacgatatttgtcaatcgtgctttttctcgggaagagtggcaaagggtcataagatgcattatcctatggtcgaatactgtacgcctaccacttcgggcgaggatgtgcgagattttgcgaaagtgctgaaaaacaagttcagaactaagagatactttgccaagcaccccagaatggggtatctgccggtgcaaaccgtgcttgagggagataacatggaaaccgatactatg

SEQ ID NO: 251327 - DNA, 3591 bp, synthetic construct
  misc_feature 1..3591: note = Description of Artificial Sequence: Synthetic coding sequence
  source 1..3591: mol_type = other DNA
atgctttggtgggaggaagtggaggattgctacgaacgggaagatgtccagaagaaaacgtttaccaagtgggttaacgcccagttctccaagtttggaaagcagcacatcgaaaacctcttctcggacctccaagatggacgcaggctgctggacctcctggaaggactgactggacagaagctgccgaaagaaaagggatcgactcgggtccatgctctgaacaacgtcaataaggcgttgcgcgtgctgcagaataacaatgttgatttggtcaacataggatcaaccgacatagttgacgggaaccacaaactcaccctcggcctgatctggaacatcattctccattggcaggtgaagaatgtcatgaagaatatcatggcagggttgcaacaaaccaactcggagaagatcctgctgtcatgggtcaggcaatccacccgaaactacccgcaggtgaatgtgatcaacttcactaccagctggtcagacggactcgctctgaacgctctgatccactcccatagaccagacttgttcgactggaattccgtggtgtgccagcagtctgccacgcagcggttggaacacgctttcaatatcgcacgctaccaactgggaatcgaaaaactgctggacccggaggacgtggacaccacctaccctgacaaaaagtctatcctcatgtacatcacttccctgtttcaagtgctgccgcaacaggtgagcatcgaggccattcaagaggtggaaatgttgccgcgtccgccaaaggtcacgaaggaggagcacttccagctgcatcatcaaatgcactactcacagcagattaccgtgtccctcgcccaaggctacgagcgcacctcctcaccgaaaccacggttcaaatcatacgcatacacccaagctgcctacgtgactacctccgacccaactagatcaccgttcccctcccaacacctggaagcgcctgaagataaatccttcgggagctcgctgatggaatcagaagtgaacctggaccggtaccaaactgcccttgaggaagtcctcagctggcttctgtcggcggaggataccctgcaggctcaaggtgaaatctcgaacgacgtggaagtggtgaaggaccagttccacactcatgagggctacatgatggacctgaccgcccatcagggtcgcgtcggaaatatcttgcaactgggatccaaacttatcggtactggaaagctcagcgaggacgaagagactgaggtccaggagcagatgaacctcctcaacagccggtgggaatgcctgcgggtggccagcatggagaagcaatcgaatctgcaccgggtcctgatggaccttcagaaccagaagctcaaggaattgaacgattggctcactaaaaccgaggaacgtactcggaagatggaagaggaaccgctgggacccgatcttgaagatttgaagagacaagtgcagcaacacaaagtgctccaggaagatctcgagcaggaacaagttcgggtgaactccttgacccatatggtggtggtcgtggacgagtcctcgggagatcacgccacggcagccttggaagaacagttgaaggtcctgggagatcgctgggccaacatctgccgctggaccgaggaccggtgggtgctgcttcaagacatattgctgaagtggcaacggctgactgaggaacagtgtctgttttcagcttggttgtccgagaaggaggacgcagtcaataagattcataccaccggattcaaggatcaaaatgagatgctctcctcgctgcagaagctggctgtgctgaaagccgaccttgaaaagaagaaacagagcatgggcaaactctactcgctcaagcaggacttgctcagcaccctgaagaacaagtcggtgactcaaaaaaccgaagcatggctcgataacttcgcccgttgctgggacaatctggtccagaaactggaaaagtcaaccgcgcaaatctcccaggctgtgacgactactcaaccgagcctgacccaaaccactgtgatggaaaccgtcaccacggttaccacccgcgagcagattctggtcaagcacgcgcaggaagaactgccgccgcctcctccacagaaaaagagacagatcactgtggatactctcgaacgcctgcaggaactccaggaagcaaccgatgaactggatctgaaactcagacaagcggaagtcatcaagggatcgtggcaaccagtcggtgatctcctcatcgattcactgcaagatcacctggagaaggtcaaagccctgagaggggaaatcgccccactcaaggagaatgtgtcgcatgtcaatgaccttgcccggcagctcaccacgctgggcatccagctgtctccgtataaccttagcaccctggaggacctgaacactcggtggaagctgctgcaggtggcggtggaggatagagtgaggcagctccacgaagcacacagagacttcggtccagcgtcccagcatttcctgtccacctcagtgcaaggcccatgggaaagagctatcagcccaaacaaggtcccttactacatcaaccacgagactcagacgacctgctgggaccatcctaaaatgaccgaactttaccagagcctcgcagacctgaacaatgtgcgcttcagcgcttaccgcacggcgatgaagctgcgcagattgcaaaaggcactttgtctggatctgttgtcgctctccgccgcttgcgacgcgcttgatcagcacaatctgaaacagaatgatcagcctatggatatccttcagattatcaactgtctgaccaccatctatgaccggcttgagcaggagcacaataacctggtaaacgtgccgctgtgcgtggacatgtgcctgaattggctgcttaacgtttacgacacgggacggactggaagaatccgtgtgttgtccttcaagacggggatcatctcactctgcaaagcccatctggaggacaagtataggtacctctttaaacaggtggcatcgagcactggcttttgcgatcagcgcagactgggtctgctgctgcatgattccatccagatccctaggcaacttggagaagtggcatcatttggcggatcaaacattgaacctagcgtgcgctcctgtttccagttcgccaataacaaacctgaaattgaggctgcgctgttcttggattggatgcggctggagccacaaagcatggtttggctcccggtgctgcaccgcgtggctgccgcagaaaccgcgaaacaccaagccaagtgtaatatctgcaaggagtgcccgatcatcgggttcaggtatcgctcgctgaaacatttcaattacgatatatgtcaatcctgcttcttttccggccgcgtggccaagggacacaagatgcattatcccatggttgagtactgcaccccgaccacgtcgggagaagatgttagggacttcgcaaaggttttgaaaaacaagttcagaaccaaacgctactttgccaagcaccctcggatgggttacctcccagtgcagaccgtgctggaaggcgacaatatggaaaccgacactatg

SEQ ID NO: 251328 - DNA, 3591 bp, synthetic construct
  misc_feature 1..3591: note = Description of Artificial Sequence: Synthetic coding sequence
  source 1..3591: mol_type = other DNA
atgctgtggtgggaagaggtggaagattgctacgaacgcgaggacgtgcagaagaaaactttcaccaagtgggtgaacgctcagttctcgaagttcgggaagcagcacatcgaaaatctcttctccgatcttcaggacggaagaaggcttctggacctgcttgaaggactcaccggtcaaaagctgccgaaggagaagggatcgaccagagtgcatgccctgaataacgtgaacaaagccctgagggtcctgcagaataacaacgtcgacctggtgaacattggatccaccgacatcgtggacggaaaccataagctgaccctggggttgatctggaatatcatccttcattggcaggtgaaaaatgtcatgaaaaacatcatggccggcctccaacagacgaacagcgaaaagatcctgctcagctgggtccggcagtccaccaggaactacccacaggtgaatgtgatcaactttaccacctcgtggtcggacggactggctctcaacgcgctgatccactcacaccgaccggacctgtttgactggaactcagtggtgtgccaacaaagcgcaacgcagcggctggaacacgcgttcaatattgctagataccaattgggaatcgaaaaactgttggatccggaggacgtggacaccacctaccccgacaaaaagtcaatcctcatgtacatcacctcacttttccaagtgctcccgcaacaagtgtcgatcgaagcaattcaggaggtcgaaatgctgccacgaccgccaaaggtgacgaaggaggagcactttcaattgcatcaccagatgcactacagccaacaaatcaccgtgtccctcgcgcagggatacgaaagaacctcttcccccaagcctcggttcaaatcatacgcctacacgcaggccgcttacgtcactacctccgaccccacccgctcccctttcccatcccagcacctcgaggctccggaagataagtcattcggcagctccctgatggaatcggaagttaacctggaccggtatcaaaccgctctggaggaagtgctctcttggctgctgagcgccgaagataccttgcaggcgcagggagaaatctcgaacgacgtggaggtggtgaaggatcaatttcatacccacgaaggctacatgatggatctgactgcacaccagggaagggttggaaacatcctgcagctggggtcgaagctcatcgggaccggaaagctgagcgaggatgaagagactgaagtccaagagcagatgaatttgttgaactcacggtgggaatgcctccgcgtcgcttccatggaaaagcagtcgaacctgcatcgggtgctgatggacctgcaaaatcagaaactcaaggaactcaacgattggctgaccaagaccgaggaacgtaccagaaaaatggaagaagagccgcttggaccagatctggaggacctgaagcgccaagtgcagcagcacaaagtgctgcaagaggatctggagcaggaacaggtgcgggtgaacagcttgacccatatggttgtggttgtggacgagagctcgggcgaccacgccaccgctgctctcgaagaacagctcaaggttctcggagacagatgggccaatatctgccgctggactgaggacagatgggtgctgctgcaagacattctcctcaaatggcagcggctgactgaagaacaatgtttgttcagcgcctggttgtccgagaaagaggacgctgtgaataagatccacactaccggattcaaagatcagaacgagatgctgtcaagcctccaaaagctggcggttttgaaggcggacctggagaagaagaagcagtcgatgggcaagctgtactctcttaaacaggacctgttgtctactttgaagaacaaatctgtgacccaaaaaaccgaggcctggctggacaacttcgccaggtgttgggataacctggttcagaagctcgaaaagtcgaccgcacaaatctcccaagcagtcaccaccactcaaccttccctgactcaaactaccgtgatggaaaccgtgactactgtgactacgcgagaacaaattctggtgaagcacgctcaggaagaacttccgccaccgccaccacagaagaagcgccaaataactgtggacaccctcgaaagattgcaagaactccaggaggcaactgacgagcttgacctgaaactccggcaggccgaagtcatcaagggtagctggcagccggtgggtgatctcctgattgactcacttcaagatcacctggaaaaagtgaaggccctgaggggtgaaattgcccctctcaaggagaatgtgtcgcacgtgaacgacctggcccgccaactgaccacgctgggaatccagctgtcgccgtacaacctttctactttggaagatctgaatactcggtggaaactgctgcaggtcgctgtcgaagatagagtccgccagctccacgaggcgcacagagatttcgggcccgctagccagcacttcctttcgacttcggtgcagggaccgtgggaaagggctatttccccgaacaaggtcccatactacattaatcatgaaacccagacgacctgttgggaccatccgaagatgactgaattgtatcagtcgctggcggacttgaacaatgtgcgcttcagcgcctaccgaaccgccatgaaacttcggcgcctccagaaagcactgtgcctggatctgctctcactgtccgccgcatgcgacgccctggatcaacacaacctgaagcagaacgaccaaccaatggatatcctgcagatcataaactgcttgacgactatctacgatcggcttgaacaggagcataacaacttggtcaatgtgcccttgtgtgtcgacatgtgcctcaactggcttttgaatgtctacgataccggacggaccggacggatccgggtccttagcttcaagacgggcatcatctcgctctgtaaagctcatctcgaggacaagtaccgatatctctttaagcaagtcgcctcttccaccgggttctgcgaccaacggcggctcgggctgctgcttcacgactcgatccagattccgagacagttgggagaggtggcgtccttcggaggatcgaatatcgaaccatccgtgcgctcttgcttccagttcgctaacaataaaccggaaatcgaagccgccctgttcctcgattggatgcggctggagcctcagagcatggtctggctccccgtgctgcatagagtcgccgccgcggaaactgcaaaacaccaggccaaatgtaacatctgtaaggagtgcccaattatcggatttcgctatcgcagtcttaaacactttaactacgacatctgccagtcgtgctttttctccggccgggtggcgaagggacataagatgcactatccgatggtagagtactgtactccaaccacctcgggtgaagatgtgcgagatttcgccaaagtgctcaagaataagttccgcactaagcgctacttcgccaagcacccgagaatgggttacttgccagtgcagaccgtcctggagggggacaacatggagactgacaccatg

SEQ ID NO: 251329 - DNA, 3591 bp, synthetic construct
  misc_feature 1..3591: note = Description of Artificial Sequence: Synthetic coding sequence
  source 1..3591: mol_type = other DNA
atgttgtggtgggaggaggtagaggactgttatgagagggaggatgtgcaaaagaaaaccttcactaaatgggtgaacgcacagttttcaaaatttggaaagcaacatattgaaaatctgtttagcgacctgcaggacgggcggcgtctgttggacctgctggaagggctgaccggccagaagctcccaaaggaaaagggttcgacaagggtgcacgcgctcaacaacgttaacaaagctctcagagtgctccagaacaacaacgtggacctggttaacatagggagcaccgatatagtggatggcaaccataaattaacactcggcctcatttggaatatcatcctccactggcaggtgaagaatgtgatgaagaatatcatggccggattgcagcagaccaacagcgagaagatcctgctcagttgggtgcggcagagcacacggaactatccacaagtgaatgtgattaacttcaccacatcatggagcgacggactggctctcaatgcgctcattcatagccacagaccggacctgttcgattggaacagtgtggtgtgccagcagagtgcaacgcagaggctggaacatgccttcaatatcgcccggtatcagcttggtatagagaagctgctggatcctgaagacgtcgacactacttacccagataagaagtcaatattgatgtatataacctcgttattccaggtgctccctcagcaggtatcgatcgaagccatacaagaggtcgagatgctgccacggcctcccaaggtgaccaaagaggaacattttcagctccaccatcagatgcactactctcaacagataaccgtgtccctcgcacagggttacgaacgaacctcttcgccaaaaccgcgcttcaagtcttacgcctatacccaggccgcgtatgtcaccacgtctgatcccacgcgcagcccattcccatcacagcacttggaggcaccagaggataagagcttcggcagctcattaatggagtctgaggtcaacctggatcgatatcagacagcacttgaggaggtgctttcatggcttctgagtgcggaggacaccctccaggctcagggtgagataagcaatgacgtggaggtggtaaaggaccagttccacacacacgaaggatatatgatggacctgacagcacaccaggggagggtgggaaatattttgcagcttgggtctaagctcattggcaccggtaagctgagcgaggacgaggagaccgaagtccaggagcaaatgaatctgctcaactcccggtgggaatgtttaagagtggcgtctatggagaaacagagcaacctccaccgggtgctaatggacctccaaaatcaaaagctgaaggagctgaatgattggctgactaaaacagaggagcggacacgcaaaatggaggaggaacctctggggcctgacctggaagacctcaagcgtcaggtgcagcagcacaaggtcctccaagaagatttggaacaagagcaggtgcgcgtgaattctctcacccacatggtggtggtcgtggatgagtcttctggcgaccacgccacagccgccctggaggaacagttgaaagtgctcggagaccggtgggctaatatctgtagatggaccgaagaccggtgggtcctcctgcaagatatactcctcaagtggcagaggctcactgaagaacagtgcctcttttcagcgtggctgtctgagaaagaagatgcggttaataaaattcacactacaggttttaaagaccagaatgaaatgttgtcttctcttcagaaactggcagtcctgaaagccgatcttgaaaaaaagaaacaaagtatggggaagctctattccctcaaacaggatctgctgtcaactctgaaaaacaagtccgtcacgcagaagaccgaggcctggcttgacaatttcgcaagatgctgggacaacctggttcaaaagctggagaagtcgaccgctcagatatctcaggccgtgacaactacccagccttcattaacacagaccaccgttatggaaactgtgacaacggttacaactcgggagcagatattagtgaagcacgcccaagaggagctcccacctccaccaccccagaagaaacgtcagattacggtcgacacacttgagagattgcaggagttgcaggaggcaaccgatgaactcgatttaaagctgaggcaagcggaggtcataaaaggctcttggcaacctgtgggggatttgctcatcgactctctccaggaccacctggaaaaagtgaaagctctacgaggggaaattgctccactgaaggagaatgtgtcccatgtgaatgacctggccaggcaactgaccaccttgggcatccagctgtctccctacaatttatcaacactggaggatttgaacaccaggtggaagctgctccaggtggcggtggaagatcgggtgcgccaactccatgaggcgcatcgtgattttggacccgcctctcagcactttctgagcactagcgtacagggcccctgggaacgggccatcagccctaataaggtgccatactacattaaccacgaaacacagacaacttgctgggaccaccccaagatgactgagctgtatcagtccctggcagatcttaataacgtgcgctttagtgcgtataggacagcgatgaagcttaggaggctgcagaaagccctgtgcttagacctgctgagcctatctgcagcttgcgacgccctggatcagcataacctcaagcagaacgaccagcctatggacatcctgcagatcattaactgcttgaccactatatacgatcgcctcgagcaggagcataacaacctggttaatgtcccgctgtgcgtggacatgtgtctgaactggctcctgaatgtgtatgacaccggaagaacagggcgcataagggtactgtcattcaagactggaatcatctcactctgtaaagcccacctagaagataagtaccggtatttgttcaagcaagtagcatctagcacaggattttgcgatcagcgccggttgggacttctattacacgatagcattcagatccctcgacagctgggagaagttgccagttttggtggatcaaacatcgaaccaagcgtccgcagttgcttccaattcgcgaataataagcccgagattgaagcagctttattcctggactggatgagattggaacctcaatccatggtctggctgcccgtattgcaccgggtggccgctgccgaaactgctaaacaccaggccaagtgcaatatttgtaaggagtgccctattataggtttccgttacaggtctctcaagcactttaactatgatatatgtcagagctgtttcttcagtgggcgtgtcgccaagggtcacaaaatgcattatcccatggttgaatactgtacaccaaccacatccggtgaagatgtgagagatttcgctaaggtgctcaagaacaagtttcggaccaaacgctacttcgctaaacatccccgtatgggctatttgcctgtgcagactgttttggagggggacaacatggagaccgacaccatg

SEQ ID NO: 251330 - DNA, 3591 bp, synthetic construct
  misc_feature 1..3591: note = Description of Artificial Sequence: Synthetic coding sequence
  source 1..3591: mol_type = other DNA
atgctgtggtgggaggaagtcgaggactgttacgaacgtgaggatgtgcaaaagaaaacgtttactaagtgggtgaatgcacaattttccaagtttgggaaacaacatattgaaaatctcttctcagatctccaggatggtagacgtctgcttgatctgctggaaggtcttaccggacaaaaacttccaaaggaaaagggtagcactcgcgtgcatgcacttaacaacgtgaataaggcactccgggtgcttcaaaacaacaacgtggatctggtcaatattggtagcaccgacattgtcgatggaaatcacaaacttactctgggactgatttggaacattattcttcactggcaagtgaaaaacgttatgaaaaacatcatggcaggcctccagcagactaactcagagaagattcttctgtcctgggtcaggcaatcgacccggaattacccacaggtgaatgttatcaactttaccacctcatggtccgatggactcgcattgaacgcacttattcactcccacagacccgacttgttcgactggaatagcgtggtctgtcagcagtcagcaacccaacggctcgagcatgcctttaacatcgctcgctaccagctgggtatagaaaaacttctggatcccgaagatgtcgatactacgtaccctgataagaagtcgattcttatgtatatcacgagcctgtttcaagtcctccctcagcaagtgtcgattgaggcaatccaagaagtggaaatgttgccacgccctccaaaagtcacgaaagaagaacattttcaacttcatcatcagatgcattattcccagcagattactgtgtcacttgcgcagggttacgaacgaacttcctcacccaagcctagattcaagtcctacgcttacactcaagccgcatacgtgaccacctccgatccaaccagatccccgtttccatcccagcaccttgaagcacctgaagataagtcgttcggctcgagccttatggagtccgaagtcaacctggaccgctaccaaaccgcacttgaagaggtgctgtcgtggctgctttcggctgaagataccctccaagcgcagggagaaatttccaacgatgtggaagtggtgaaagaccagtttcatacccatgaaggatacatgatggatctcaccgctcatcaaggacgagtgggtaacatacttcaactcggatcaaaactgatcgggactggcaaactctccgaggatgaagagactgaagtgcaagagcaaatgaatctgctgaattcacgctgggagtgcctgcgcgtcgcatccatggagaaacagtcaaatcttcatagagtgttgatggatctgcagaatcaaaagctgaaggaactcaatgattggcttaccaagaccgaggaaagaacccgcaaaatggaagaggaaccacttggaccagatcttgaggatcttaagagacaagtgcagcaacataaggtcctgcaagaagatcttgagcaggaacaggtgcgagtgaactcgctgactcatatggtcgtggtggtcgacgaatcgtccggcgatcatgcaaccgcagcccttgaagagcaactgaaggtcctcggtgacaggtgggccaacatctgtagatggactgaagatagatgggtgctgcttcaggatattcttctgaaatggcaacggcttactgaagaacaatgccttttcagcgcctggctgtctgaaaaggaagatgcagtgaacaaaattcataccactggattcaaagatcaaaatgaaatgctgtcgtcgcttcagaaacttgccgtcctgaaggcagatctggagaaaaagaagcagtccatgggcaaactttactccctgaaacaagaccttctttccaccctcaaaaacaagagcgttactcaaaagaccgaagcgtggcttgacaatttcgcgagatgttgggataacctggtccaaaagctggaaaagtcgaccgcacagatttcccaagcagtcactactacccaaccctccttgactcagactacggtgatggaaacggtgaccactgtgactactcgcgaacaaattcttgtgaagcatgcacaggaagagctccccccgcctcctccccaaaagaagaggcaaattactgtggacaccctggagcgtctccaggaacttcaggaagccaccgatgaattggacctgaaactgagacaagcggaggtgatcaagggaagctggcaacctgtgggagatctgctcattgactcgctgcaagatcatcttgaaaaagtcaaggcacttaggggggaaatcgcacctctgaaggaaaacgtctcccatgtgaatgatctcgcccggcaactgactacgctgggcattcagctgagcccctacaacctttctacccttgaagatctgaataccagatggaagctgcttcaagtggcggtggaagatcgagtgcgacagctgcatgaggcacaccgcgacttcggaccagcttctcagcacttcctgtccacgtcggtgcaaggtccctgggagcgcgccatctcaccaaataaggtcccatattacattaaccatgaaacccagaccacctgctgggatcatcccaagatgactgagctgtaccaatccttggccgatctcaacaacgtccggttttcggcatacaggactgccatgaaactcagacgacttcaaaaggcactttgccttgatctcctgtcgttgtccgctgcatgtgacgccctcgatcagcataacctgaaacagaatgatcaaccaatggatattctccagatcataaactgcctgaccacgatttacgacaggctggagcaggaacataacaacctcgtgaacgtccctctgtgtgtggatatgtgtctgaattggcttcttaatgtgtacgatactggtcgcactggtcgcatcagggtgctgtcgtttaagaccggtataatctcgctgtgtaaagcccacctggaggacaagtaccggtacctctttaagcaagtcgcctcgagcaccgggttctgtgatcaacggcggctgggtctgcttctgcacgatagcatacagatacctcgtcaactcggagaagtggcatcctttgggggttcgaatattgagccatccgtgcgatcctgctttcagtttgcgaacaacaaacctgaaattgaagcagcacttttcttggattggatgagacttgaacctcaatccatggtctggctgcctgtccttcacagagtggcagcagccgaaaccgcaaaacatcaggcaaagtgcaacatctgcaaagaatgcccaatcatcggctttcgttaccgatccctcaagcactttaactacgatatttgtcaaagctgtttcttttccggtagagtggcaaaggggcacaagatgcattaccccatggtcgagtactgcaccccaaccactagcggagaagatgtgagggattttgcaaaggtgctgaagaataagttccgaaccaaaaggtactttgcaaagcacccacggatgggttaccttccagtgcagaccgtgttggaaggagataacatggaaaccgataccatg

SEQ ID NO: 251331 - DNA, 3591 bp, synthetic construct
  misc_feature 1..3591: note = Description of Artificial Sequence: Synthetic coding sequence
  source 1..3591: mol_type = other DNA
atgctctggtgggaggaggtagaggattgttatgaaagggaagatgtgcaaaaaaagacatttactaagtgggtaaacgcgcagttctccaaatttggaaaacaacatattgagaatctgtttagtgatttgcaagatggacgtagactccttgatcttcttgaagggttaactggacaaaagctgccgaaggagaagggtagtacacgagttcacgcgttgaacaatgtcaataaagcgttgagagttttgcaaaacaataacgttgatctcgttaacataggatcaacagacattgttgacggaaaccataagctaacacttggtttgatttggaatattattctgcactggcaagtgaagaatgtaatgaaaaatataatggcgggcttacagcaaacgaatagtgaaaagatcctccttagctgggtgagacaatctacccgtaattatccgcaagtgaacgtaattaatttcactacaagctggagtgatggactcgctttgaatgcccttattcatagtcaccgtccagacttattcgattggaattcagttgtttgtcaacaatcagctacacaacggcttgagcatgcttttaatattgcacgatatcaacttggcatcgagaaattgttggacccggaagacgttgacactacatatccagataaaaaatcaattctcatgtatatcacttccctttttcaagtccttcctcagcaggtatctatagaagcgattcaagaagtggagatgcttccccgtccgccaaaggtgacaaaggaagaacattttcagctccatcaccagatgcactattcacagcaaattacagtttcattggctcagggttatgaaagaactagtagtcctaaaccaaggtttaagtcatatgcttacactcaagctgcgtacgtcaccacatctgatccaacgcgatcccctttcccaagtcaacatttggaagcacctgaggataagtctttcggatcttcgcttatggaatctgaggtcaatcttgacagatatcagaccgcgctggaagaggttttgtcctggctcctttcagcggaagatactttgcaagcacaaggagagataagtaatgatgtggaagtagtaaaagatcagtttcacacacatgagggttacatgatggacctgacagcccatcaaggacgtgttggaaacattttacagctcggatcaaaactaatcggaactggaaagctatcagaggatgaagagactgaggtgcaagaacaaatgaacctcttgaactcgcgatgggaatgcctgcgagtggcatccatggagaagcagagtaatctccatcgtgtccttatggatttgcaaaatcaaaaattgaaagagctaaacgattggctaactaaaactgaagagcggacaagaaaaatggaggaagagcctttgggtccggatcttgaagacctcaaacgccaggtacagcaacataaagttctccaggaggatttggaacaagaacaagtgcgagtcaactcacttactcatatggtggtggttgtagacgaatcttcgggagaccatgctaccgctgccttggaggaacaacttaaagttttgggagatcgttgggctaatatttgtcgttggacggaggacagatgggttttactccaagatattcttctgaagtggcaacgtctcacagaagagcaatgtctgttcagtgcatggttgtcagaaaaagaagatgcggttaataaaattcatacaactggtttcaaagatcaaaatgaaatgctgtcttctttacagaaactagccgtcctaaaagctgatttggaaaaaaagaagcagagcatgggtaagctatattcgctgaagcaagatttgctttcaacactaaaaaataagtcggtgacacaaaaaacagaagcctggttagataattttgcaagatgctgggataatctcgtccaaaaactagaaaagtctacagcccaaatctctcaggcggtaacgacaacacaaccatctcttacacaaaccacggttatggaaactgtgaccacagtgacaactcgagaacaaattctagtcaaacacgcgcaggaggagcttccaccgccgcccccacaaaagaaaaggcagattactgtggatacgcttgaacgtcttcaagaattgcaggaggctacggatgagctagatcttaagctgaggcaggctgaggttataaaaggatcctggcaacctgttggagatttgcttattgattcattgcaagatcatctcgaaaaggtgaaagcactgcgaggagaaatcgcgccactgaaggagaacgtctcacatgtcaacgacttggcacgccaattgactacactgggtattcaattgagtccatataatctttcaactcttgaagatctgaatacaagatggaagctacttcaggttgcagtggaagaccgagtccgtcagctgcatgaggcccatcgagacttcggcccagcatcacagcacttcctctctacttctgtacagggaccgtgggaaagggctattagtccaaataaggtgccgtattatattaatcacgaaacacagacaacatgctgggaccatcctaaaatgacagaattgtaccaatctcttgcagacctcaataatgtccgtttttcagcgtatcgtacggcgatgaagctacgcaggcttcaaaaggcgttgtgtttagatttattaagtcttagtgcggcttgcgacgcacttgaccaacacaacctcaagcaaaatgatcaaccaatggatatcctccaaatcatcaattgcctgaccaccatctatgacagactggaacaggaacataataatcttgtgaacgtcccgctttgtgtggatatgtgtttaaactggcttctaaacgtctacgatactggccgtactggacgaataagggtacttagctttaaaaccggaattatttcgctctgtaaggcacatcttgaagataaatacagatatttgtttaagcaagttgcaagttctacgggtttctgcgatcaaagaagattaggattacttctccatgactcaattcagatccctcgccagttgggggaagtcgcatcttttggagggtcaaatattgaaccatctgttcgtagctgttttcaattcgctaacaacaagcctgaaattgaagccgcgcttttcttggactggatgcgactcgaacctcaatcaatggtctggctaccggttctgcatcgtgttgcggccgcagagaccgctaaacatcaagcaaaatgcaatatttgtaaggaatgcccaataatcggattccgttaccgctcgcttaagcacttcaattacgatatttgtcaaagttgtttcttcagtggcagagttgcaaaagggcataagatgcactacccgatggttgaatactgtaccccaacaacatcaggagaagacgtcagagatttcgctaaagtgctcaaaaacaaattccgaacaaaacgttatttcgccaaacatccaagaatgggatatcttcccgtccagacagttctggaaggtgataatatggaaacagacacaatg

SEQ ID NO: 251332 - DNA, 3432 bp, synthetic construct
  misc_feature 1..3432: note = Description of Artificial Sequence: Synthetic coding sequence
  source 1..3432: mol_type = other DNA
atgctgtggtgggaagaggtcgaagattgttacgagagggaagatgtgcagaagaaaactttcactaagtgggtcaatgcccaattctccaaattcgggaagcagcacatcgaaaatctcttctccgacttgcaggacggacggcggctcctggaccttctcgaaggcctgaccggccagaagctgccaaaggaaaagggttcaacgcgggtacatgcgctgaataatgtgaacaaggcattgcgcgtgctgcagaataacaacgtggacctggtgaacattggatccaccgatatcgtggatggaaaccacaagctgactctcggactgatctggaacattatcctgcattggcaggtgaagaacgtcatgaaaaacatcatggccggactgcagcagaccaactcagaaaagatcttgctctcctgggttcggcaatccacccgcaattaccctcaggtgaacgtcatcaacttcactacttcgtggtcggacgggcttgcccttaatgccctcatccactcccaccgtcctgacctgttcgattggaattcagtggtgtgtcaacagtccgccactcaacggctggaacatgcttttaacattgcccgctaccagttgggaatcgagaaactgcttgaccccgaggacgtggatactacttaccccgacaaaaagtcgatcctcatgtacataacctctctgtttcaggttttgccccagcaggtgtcgatcgaagcaatccaagaagtcgaaatgctccctagacctccaaaagtgacgaaggaagagcactttcaactgcatcaccagatgcactactcacaacagatcacggtgtcgttggcccagggatacgaacggaccagtagcccgaagccaaggttcaagagctatgcgtacactcaggcggcttacgtgaccacgtccgacccgaccagatcgcccttcccgtcacaacatctcgaagcaccggaggacaagtccttcggtagcagcctgatggaatccgaagtgaacctcgaccggtatcagaccgccctggaagaagtcctgtcatggctcctgtcggccgaagataccctgcaggcacaaggagaaatctcgaatgacgtggaagttgtgaaagaccagtttcacactcatgaaggttacatgatggacctgaccgcacatcagggacgcgtgggaaatatcctccagctcggatccaaactgatcgggaccggaaagctgagcgaagatgaggaaacggaggtccaggaacagatgaacctgctgaactcgcggtgggagtgtctcagggtggcctccatggagaagcaatctaatctccacagagagatttcatatgtcccgtcgacctacctgactgaaatcacccacgtgtcacaagcgctgctcgaagtggaacagttgctcaacgcccctgacctgtgcgccaaggatttcgaggacctgttcaagcaggaggagtcactcaagaacatcaaggacagcctgcagcagtcctcaggacggatcgacatcatccactcgaaaaagaccgccgccctccagagcgctaccccggtcgagcgggtgaagctccaagaggcgctctcgcagctcgatttccagtgggaaaaggtgaataagatgtacaaggaccggcagggccgattcgataggtcggtcgagaagtggcggcgcttccattacgacattaagatcttcaaccaatggctgacggaagccgagcagttcttgagaaaaacccaaatccctgaaaactgggaacacgccaagtacaagtggtacctcaaagagctgcaggatggcatcggccaaagacaaaccgtggtgcggaccctcaacgctaccggcgaggaaatcatccagcagagctccaagactgatgcctccatcctgcaggagaaactgggctcgctgaatcttcgttggcaggaagtgtgcaaacagcttagcgatcgtaagaaacggcttgaagagactctggagagactgcaggagctgcaggaggctaccgatgagctcgatctgaagctgaggcaggctgaggtgatcaagggatcatggcaaccggtgggcgacctgctgatcgattcgttgcaggatcatctcgagaaggtgaaggccctgcgcggcgagatcgccccgctcaaggaaaacgtgagccacgtgaacgatctcgccagacaactcactactctcggtatccaactgtcaccatacaacctgtccaccctcgaggacctgaatactcgatggaagctgctccaagtcgcagtcgaagatcgcgtccgccaactgcacgaggcccaccgggacttcggccccgcttcacaacacttcctgtccacttcggtgcaaggaccttgggagcgcgcaatctcacccaacaaggtcccgtactacatcaatcacgagactcaaaccacctgttgggaccacccaaagatgaccgagctgtaccagtcgctcgccgacctcaacaacgtcagattttccgcctatcgcaccgccatgaaactgcgccggctccagaaagccctgtgtctcgacctcctgtcgctttccgcggcgtgtgacgcgctggaccaacacaacttgaagcagaatgatcaacctatggatatcctccaaatcattaactgtctgaccactatctacgacagactggaacaggagcacaataaccttgtgaatgtgccgctgtgcgtggatatgtgcttgaattggctcctgaacgtgtacgacactgggcgcacgggtagaatccgcgtcctcagctttaagaccgggatcatctccctttgcaaggcgcacctcgaggacaagtaccggtacctgtttaagcaagtcgcctccagcaccggcttctgcgaccagaggagactgggacttctgctgcacgatagcattcagatcccgcgacagctgggagaagtcgccagcttcggaggttccaacatcgaaccgagcgtgcggtcctgcttccaattcgcaaacaacaagccggaaatcgaggccgcgctgttcctcgactggatgcggttggaaccgcagtcgatggtctggctcccagtgctgcatcgcgtcgcggccgccgagactgcaaagcaccaggccaagtgcaacatctgcaaagagtgccctatcatcggattccggtatcggtcgctgaagcacttcaattacgatatctgccaatcatgttttttctcgggacgcgtggcgaaaggacataagatgcattacccgatggtggagtactgtacccccaccacgtccggtgaggacgtgcgggacttcgccaaggtgctgaaaaacaaattccgcaccaagagatacttcgcgaaacacccacgaatgggctacctcccagtgcagaccgtgctcgaaggagacaatatggagactgacacgatg

SEQ ID NO: 251333 - DNA, 3432 bp, synthetic construct
  misc_feature 1..3432: note = Description of Artificial Sequence: Synthetic coding sequence
  source 1..3432: mol_type = other DNA
atgttgtggtgggaagaagtggaggactgctacgagagggaggacgtgcagaaaaagaccttcaccaagtgggtcaacgcccagtttagcaagtttggaaaacagcatattgagaaccttttcagcgatctccaggatggcagacgcctcctggacctccttgagggcctgacgggtcagaagctgccgaaagaaaagggatccacccgcgtccatgcgctgaataatgtgaacaaagctctgcgcgtgctccaaaacaacaacgtcgatctcgtcaatatcggatcgactgatatagtggacggcaatcacaagctcaccctgggtctgatctggaacatcatcctgcattggcaagtgaagaatgtgatgaagaatatcatggcggggttgcagcaaaccaactcagaaaagatcctgctgagctgggtgcggcagtcgactaggaactacccacaggtgaatgtcatcaacttcactacctcatggtcggatggattggccctgaatgcactcattcactcgcaccgcccagacctcttcgattggaattcagtcgtgtgccagcagtcggccactcagcgcctggagcacgctttcaacatcgcgagataccagctgggaatcgagaaactccttgaccctgaagatgtggataccacctatccagacaagaagtcaatcctcatgtacatcacgtcgctgttccaagtcctgccacagcaggtgtcgatcgaagcgatccaagaggtcgaaatgcttccacgaccgcctaaggtgaccaaggaggagcactttcaactccatcaccaaatgcactactcgcagcagatcactgtgtccctggctcaggggtacgaacgcacctcatcgccgaaaccgaggtttaagtcctacgcctacacccaggctgcgtatgttaccacttcagacccgacgcgcagccccttcccgtcacaacatttggaagcacctgaggataagtccttcggttcctccctcatggagtccgaggtgaacctcgaccgctaccagacggcgctggaagaggtgctctcatggctgctgagcgccgaggacaccttgcaggcacaaggggagatctcgaatgatgtggaagtcgtgaaggaccagttccacacccacgagggatacatgatggacttgacggcgcaccagggacgagtgggaaacattctccaactgggaagcaagctgatcgggaccgggaagctgtcggaggatgaagagactgaagtgcaagaacaaatgaacctcctgaattcacggtgggagtgtctgagagttgcgtcgatggaaaagcagtccaatttgcaccgggaaattagttacgtgccttcgacctacctgaccgagatcacccacgtgtcacaggccctgctggaagtggaacagctccttaatgctccggacctctgtgccaaggacttcgaggacttgtttaaacaggaagaatcgctcaagaacattaaggatagcctgcagcaatcatcaggtcggatcgacatcattcattcgaagaaaaccgcagctctccagtcggctaccccggtagaaagagtcaagctccaagaagccctctcgcaactggacttccagtgggaaaaggtcaacaaaatgtacaaggaccgccaaggaagattcgaccggtcggtcgagaaatggcgcaggttccactacgacatcaagatcttcaatcagtggctgaccgaagctgagcaattcctccgcaagacccagatcccggaaaattgggaacacgcgaagtacaaatggtacctgaaggaactccaagatggaatcgggcagaggcagaccgtcgtccgcaccttgaacgcaactggagaggagatcattcagcaatcgagcaagactgacgcctcaatcctccaggagaagctgggctcgctgaacctccgctggcaagaggtctgcaagcagctgtccgatcggaaaaaacggcttgaagaaactttggagcggcttcaagagctgcaagaagccactgatgaattggatcttaagctgcgccaggccgaggttatcaagggcagctggcagccggtgggggacctgctcatagactccctgcaagatcacctggaaaaggttaaggcgttgagaggtgagattgcgcctctgaaagagaatgtcagccatgtgaacgacttggcccgccaactgaccactctcggaattcagttgtcgccatacaacctgtccaccctcgaagatctgaatactagatggaaattgcttcaagtggccgtcgaggacagagtccgtcagctgcacgaagcccatcgggatttcggaccggcgtcgcagcacttcctctcaacctcggttcagggaccatgggaaagagccatctccccaaacaaggtgccgtactatatcaaccatgaaacgcagaccacttgttgggaccatcctaaaatgactgaactgtatcaatccctggccgatctgaataatgtcaggtttagcgcataccgcaccgcgatgaagctgcgcagactgcagaaggccttgtgccttgacctcctctcactctccgccgcgtgcgacgccctggatcaacacaacctgaagcagaatgatcagccgatggacattctgcagatcattaactgtctcactactatctacgataggttggaacaggaacataacaatctggtcaatgtcccgttgtgtgtggacatgtgcctgaactggctcctgaatgtgtacgataccgggcgcacgggacgcatcagggtgctctccttcaagactggaatcatctcgctgtgcaaggctcatctcgaagataagtaccgctacttgttcaaacaggtagcttcctccactggattctgcgaccaacggagactgggcctgctgctccacgatagcattcagatcccccggcagctgggagaagtcgcttcgtttggaggctcaaacatcgaacccagcgttcgctcttgcttccagttcgccaacaataagccggagattgaggccgcgttgtttctcgattggatgcggctggaacctcagtccatggtctggcttcctgtcctgcatcgggtggctgctgcggaaactgcgaagcatcaggcgaagtgcaatatctgcaaggaatgcccgatcatcggattccggtacaggtcgctcaagcatttcaactacgacatctgccagtcgtgcttcttctcgggaagggtggctaagggtcacaaaatgcattaccctatggtggaatactgcaccccgacgacttcgggcgaggacgtgagggatttcgcgaaggtgttgaaaaacaaatttcgcaccaaacgctactttgcgaagcacccgcgtatgggataccttcctgtgcagactgtccttgaaggggacaacatggaaacggacaccatg

SEQ ID NO: 251334 - DNA, 3432 bp, synthetic construct
  misc_feature 1..3432: note = Description of Artificial Sequence: Synthetic coding sequence
  source 1..3432: mol_type = other DNA
atgctgtggtgggaagaggtcgaggactgttatgagcgagaagacgtgcaaaagaaaacattcaccaaatgggtcaacgcccaattttccaaatttggtaagcagcacatcgaaaatctgttcagtgacctgcaggatggacggagacttctggacttactcgaaggattaaccggccagaagctcccgaaagagaagggatccactcgcgttcatgccttgaataacgttaacaaggcactgcgggtgctccagaacaataatgtggatctggtcaacatcgggtctaccgacattgtagatgggaaccacaagctgaccctaggcctcatttggaatattatccttcactggcaggtgaaaaacgtgatgaaaaatattatggccgggctccaacagacgaatagcgagaagatcctgctctcctgggttagacagagcacccgcaactatcctcaggttaacgtcatcaacttcactacgtcttggtctgacggactcgcgctgaacgctctgatccactcccacaggcccgacctcttcgactggaacagcgtcgtttgccagcagtcagcaacccagcggctcgaacatgctttcaatattgcccgttaccagctgggaatcgagaaactgctcgatccagaagacgttgatacaacctaccctgataagaagtccatcctcatgtatatcacctctctgttccaggttctgccacaacaagtgagcatcgaggctattcaggaagtggagatgttgccgcgcccccctaaggtcaccaaggaggaacatttccaactgcaccaccagatgcactactcccagcagataacggtgagtctcgcacagggctatgaacggaccagttctcctaaacctagattcaagtcttacgcttatactcaggctgcctacgtgacgacctccgaccccacccggtcacccttcccctcccaacacttagaagcgcctgaggacaagtctttcggcagtagtctgatggaatcggaagtcaacctcgatcgataccagacagccctagaagaagtcctttcctggctactttctgctgaggacacgctccaggcacagggcgaaatttccaacgatgtcgaggtggtaaaggaccagttccacacccacgagggatacatgatggacctgactgcacatcagggccgtgtgggtaacattctgcagctggggtccaagctcatcggcaccggcaagctgagtgaggacgaagagactgaggtgcaggagcagatgaaccttctgaactctcggtgggaatgtctcagagtggcatcaatggagaagcagtctaatctgcatcgagaaataagttacgttccgtctacgtacctaactgagataacccacgtctcacaggcgcttctggaggtagagcagctacttaatgccccagatctgtgtgctaaagactttgaggatctcttcaagcaggaagaaagtcttaaaaatataaaggacagcctccaacagagcagcggtaggatcgacattattcattccaaaaagacagccgcactacagagcgctacgccagttgagagagtaaagttgcaggaagccctctcccagctagactttcagtgggagaaggtgaataagatgtataaggaccgacagggacgatttgacaggagcgttgagaaatggagaagatttcattacgatattaagatctttaaccagtggttaactgaggcggagcagttcttgaggaaaacacagatcccagagaactgggagcacgccaaatacaagtggtacctcaaggagttacaggatggcattggccagcggcagacagtagtgcggactctgaatgccactggtgaggagataatccagcagtcaagcaagaccgatgcgtctattctgcaggagaaactcggtagtttgaatttgagatggcaggaggtgtgcaaacagctgagcgaccgcaagaagcgacttgaggagacgctggaaagattgcaggaattgcaggaagctacggacgaactggacctgaagcttaggcaggccgaggtgatcaagggctcctggcagcccgtgggcgacttgctcattgactccctccaggaccatctagaaaaagtaaaggcccttcgcggggaaatagcccctctcaaggagaatgtgtcccatgtgaacgacctagcccggcagttgactactctgggtatccagttaagcccatacaatctctccaccctcgaggatctaaacaccagatggaaactgctgcaggtggctgtggaagatcgggtaagacaattgcacgaggcccaccgagactttgggcctgcttcgcagcatttcctctcgacttccgtgcaggggccctgggaacgggccatttcaccaaataaggttccctactacatcaaccacgagacccagacaacatgctgggaccatccaaaaatgaccgagctgtatcagtcattggctgatctgaacaatgtaaggttttccgcgtacaggactgcaatgaagttgcgtagactgcagaaggctctgtgtttggatcttctatctttatcagccgcctgtgacgcattggatcaacataacctaaagcagaatgatcagccgatggatattttgcagattatcaactgcctcaccactatctatgatcgattagagcaggaacacaacaatctcgtcaacgtgccattgtgcgttgacatgtgcctaaattggctgctgaacgtatatgatacagggcgcaccgggaggatccgggtgctttctttcaaaactgggataatatcactttgtaaagcccacctcgaggataagtatcgctacttgtttaagcaagttgctagcagcacaggattctgcgatcagcgcaggctcggactgctgctccatgacagcatacagattccgcggcagttgggtgaggtggcttcttttggaggctcgaacatcgagccaagtgtgcggtcctgttttcagttcgccaacaacaaacctgaaatcgaagctgcgttgttcctggactggatgaggctggagccacagtctatggtgtggctcccggtgcttcatcgcgtcgcagcagcggaaacagcaaagcatcaggccaagtgtaatatatgcaaggaatgccctataatcgggttccgctatagatctctcaaacatttcaactatgacatctgccagtcgtgttttttcagcgggcgggtggctaaaggtcacaagatgcactatccgatggtggagtactgcaccccaacaacctccggtgaagacgttcgtgactttgcaaaggtcctcaagaataagtttagaaccaagagatatttcgctaagcacccccggatgggctacctgccagtacagacagtgcttgaaggtgataacatggagaccgacacaatg

SEQ ID NO: 251335 - DNA, 3432 bp, synthetic construct
  misc_feature 1..3432: note = Description of Artificial Sequence: Synthetic coding sequence
  source 1..3432: mol_type = other DNA
atgctttggtgggaagaggtggaagattgctacgagagggaagatgtccagaagaaaacctttactaagtgggttaacgctcaattttcgaagttcggtaagcagcatatcgaaaatctgttctccgacctgcaggacggaaggcggctgctcgatctgcttgaaggactgactggccaaaagctgcctaaggaaaagggatcgactcgggtccacgcactcaataacgtgaacaaggctctgcgtgtgcttcagaacaacaacgtggatctcgtgaacatcggatcaactgatattgtggatggcaatcataagctcactttgggtcttatttggaatatcattctccattggcaagtgaagaatgtcatgaagaacataatggcagggctgcagcaaaccaactcggagaaaatcctcctgtcttgggttcgacaatcgacccgcaactatccgcaggtgaatgtgatcaatttcaccacctcgtggtccgacggacttgcccttaatgcactgattcatagccatcgaccagatctgtttgactggaactcagtggtgtgtcagcaaagcgctacgcaacggctcgagcatgcatttaacatcgcacgataccaacttggaatcgaaaagctgctcgatccggaagatgttgacacgacctaccccgataagaaatcaatccttatgtacattacctcgttgttccaggtgttgccacagcaggtgtctattgaagccatccaagaggttgaaatgctccctagaccaccaaaagtgaccaaggaagaacattttcagcttcaccaccaaatgcactattcgcaacaaattaccgtgtcgttggcccaggggtatgaacgtacctcctcgccaaaacctcggttcaagtcgtacgcatacacccaagcagcctacgtcacgacttcagatcccactcgatctccatttccatcccaacacctcgaagcccctgaggataaatcgttcggttcctcgctgatggaatcggaagtgaaccttgatcgataccagaccgcccttgaagaggtgcttagctggctcctctcagctgaggataccctccaagcgcaaggtgaaatttcgaatgatgtggaagtggtgaaggatcaattccacacccacgagggctacatgatggaccttacggcgcatcaagggagggtcggaaacattctccaattgggttccaagctcataggtactggaaagctgtcagaagatgaggaaaccgaggtgcaagaacagatgaacctgcttaactcgcggtgggaatgccttcgcgtggcaagcatggaaaagcagtccaatcttcacagggaaatttcctacgtgccatccacctacttgactgaaattacccatgtgtcgcaagcccttctggaggtggaacagctgcttaatgctcccgatctctgtgcaaaggatttcgaagatcttttcaagcaagaggaatccttgaagaacatcaaggacagcctgcaacagtctagcggacgcatagatatcatccacagcaagaaaaccgccgctcttcagagtgcaactccagttgaaagagtgaagctgcaggaagcactgtcgcaacttgatttccagtgggaaaaagtgaataagatgtacaaagatagacaaggaagatttgatcggtcggtcgagaagtggcgcagattccattacgacatcaagatctttaaccagtggctgaccgaggcggaacagttccttagaaagactcagattcctgaaaactgggaacatgcgaaatacaaatggtaccttaaggagctgcaagatggtataggtcagcggcagacggtggtgagaaccctgaacgcgacgggagaggagataattcaacaaagctcaaagactgatgcgtcaattctgcaggaaaagttgggctcactgaacctgcgttggcaagaggtgtgcaaacagctgtcagacaggaagaaacgacttgaagaaacccttgaaaggctccaagagctgcaagaggcaactgatgaattggatctgaagctcaggcaggccgaggtcattaagggtagctggcaacctgtgggagatctgctgattgattccctccaggaccatctggaaaaggtaaaagcacttcgtggcgagattgcgccactcaaggagaatgtgagccatgtcaacgacctggcacgtcagctgactactctgggtatacagctgtcgccttacaatctcagcacgcttgaagatctcaataccaggtggaagctgttgcaagtcgccgtggaggatcgtgtgcgccagctgcacgaagctcatcgcgactttggaccagcctctcaacatttcctctcgacttcggtgcaaggcccttgggaaagggccatttccccaaacaaagtgccatactacatcaatcatgaaactcagactacctgttgggaccatccgaaaatgaccgagctctaccagtcgctcgcagatctgaacaacgtgagattcagcgcataccgcaccgcaatgaagctcaggagacttcagaaggcactgtgtcttgatctcctgtccctgtccgcggcttgtgatgcacttgaccaacacaacctgaaacaaaatgatcaaccaatggatatccttcagataatcaactgccttaccaccatatacgacagacttgaacaagagcacaataatctggtgaatgtgcctttgtgtgtcgatatgtgtcttaactggcttcttaacgtctatgacactggccgcactggacgaatcagagtgctgtccttcaagaccgggattatcagcctgtgtaaggctcacctggaagataagtacaggtaccttttcaaacaagtggcctcgtcaactggtttttgtgaccaaagacgtttgggcctcttgctgcatgattcgattcagattccccgccaacttggagaggtggcatccttcggaggatcaaacatcgaaccctccgtgagatcttgcttccagtttgctaacaataagcctgaaatcgaggccgcactcttcctcgactggatgagactcgagcctcagtcgatggtgtggctgcccgtgcttcatagggtggcggcggcagaaactgcaaagcaccaagcgaaatgtaacatttgtaaggaatgtccgataattggctttcgttacagatcgctgaagcactttaactacgatatctgtcagtcgtgttttttctcaggtcgagtcgcaaagggacacaaaatgcattatcccatggtggagtactgcacgcctaccacttcgggtgaagatgtgagggacttcgcgaaagtcctgaagaacaagtttcggactaagagatacttcgccaagcatcctcgtatggggtacctgccagtccagaccgtgcttgagggggataacatggagacggataccatg

SEQ ID NO: 251336 - DNA, 3432 bp, synthetic construct
  misc_feature 1..3432: note = Description of Artificial Sequence: Synthetic coding sequence
  source 1..3432: mol_type = other DNA
atgctctggtgggaggaggttgaagattgctacgaacgagaagacgtgcagaagaagacgttcacaaaatgggtcaacgcacaattctcaaaattcggaaaacagcacatagagaacctgttcagtgatttgcaggatggccgccgactgctggatctgctggaggggctcactgggcagaaactgcccaaggagaagggatccacccgcgtccacgctcttaataatgtaaataaagctcttcgcgtccttcagaacaataatgtggatctggttaacatcggttctacagatatcgtcgacggaaatcataagttgaccctgggcctgatttggaacatcatattgcattggcaagtcaagaacgtcatgaaaaatataatggccggcctgcagcagactaactccgaaaagattctgttgtcctgggtgaggcagagcacacgaaactacccccaggtgaacgtgatcaacttcaccacgtcctggtccgatggactcgccctcaacgcgctgattcactcccacagacctgacctctttgactggaacagtgtagtatgccagcaaagtgcaactcagcgcctcgaacatgccttcaacatcgctagataccagttgggcatagaaaagcttctcgatcccgaggacgttgatactacataccctgacaagaagtccatcttgatgtatattacatcactgtttcaggtgcttccgcaacaggtgagcattgaggcgatccaagaggtggagatgctccctagacctccgaaagtcaccaaagaagagcattttcaattgcatcaccagatgcactactcccaacaaataaccgtttccctggcacaggggtatgaacggacatcatcccctaagcctaggtttaaatcctatgcttacacccaggccgcttatgtgaccacctccgaccctacgaggtctcccttcccttctcaacacctggaggctccggaggacaagtcctttggatctagccttatggagtccgaggttaacttggaccggtatcagacagccctggaggaggtcctgagttggctgctgagcgccgaggatacactgcaggctcagggagaaatttccaacgacgtggaagtcgtgaaggatcaattccatactcacgaaggatacatgatggatctcacagcccaccaaggccgcgtgggtaatatcctgcagcttgggtcaaagctgattggaacaggaaagctttctgaggacgaggaaaccgaagtgcaggagcagatgaacctgctgaattccagatgggagtgtctccgagtcgcttctatggagaagcaatctaatctgcaccgagagatctcttacgtgcctagtacttatcttaccgagatcacgcacgtgagtcaggcattgctcgaagttgagcagctcctgaatgctccagacctgtgcgcgaaggactttgaggatctgttcaagcaggaggagtcactcaaaaacatcaaagacagtttgcagcagagtagcggcaggatcgatattattcattctaaaaagactgccgcactccaatccgcaacacccgtggaaagagtaaaattgcaggaggcactgtcccagctggactttcagtgggagaaggtaaacaagatgtacaaagaccggcaaggccgctttgacagatctgtggagaaatggagaaggtttcattatgacattaagatctttaaccagtggctcaccgaagctgaacagtttctgcggaaaacacaaattccggagaactgggagcacgccaaatataagtggtatctcaaagaactgcaggatggaatcggccagcgccagaccgttgtgcggaccctgaacgccaccggcgaggaaatcatccaacagtcctcaaagaccgacgcaagcatcctgcaggaaaaactgggctccctgaatctccggtggcaggaagtctgtaaacaactgagcgaccgaaaaaagcggctggaagaaacgcttgagcgacttcaggaactccaggaggcaactgacgagctggacctgaagctgcgacaagccgaggtgatcaaggggtcttggcagccagtgggagacttgcttatcgattctctccaggatcacctcgagaaggtgaaggctcttaggggtgagatcgctcctctgaaagagaatgtctctcacgtgaacgaccttgctcgccaactgaccacactcggaatccagctctcaccctacaacttgagcactcttgaggacctgaatacgcgctggaaactcctgcaggtagccgtggaagaccgggtccgccagttgcacgaggctcacagggacttcgggcctgccagccagcactttctttctaccagcgtgcagggcccgtgggagcgggcgatcagcccaaataaggtgccatactacattaatcatgagacccagacaacttgttgggaccaccctaaaatgaccgagctgtatcagagccttgccgatctcaacaacgtgaggttctccgcctacaggaccgctatgaaactccgaaggttgcagaaagctttgtgtttggacttgctttctctgtcagctgcttgtgacgccctggaccaacataacctgaaacagaatgatcagcctatggacatactgcagattattaactgcctcaccaccatctatgaccgcctggagcaagagcacaataatctggtgaacgtccctctctgcgtagatatgtgtctgaactggctgctgaacgtttacgatacaggtcgcaccgggcgcatcagagtcctctccttcaagacaggcatcatcagtctctgcaaggcgcatctggaagataagtatcgctatctctttaagcaggttgcatcctccaccggcttctgcgatcagcggcgattgggcttgctgttgcatgatagtatccagataccccggcagcttggagaagtcgccagtttcggcggctcaaatatcgagcctagcgttcgctcttgcttccaatttgctaacaataagcccgaaattgaagcagcgctttttctggactggatgagactggaaccccaatctatggtgtggctcccagtcctgcaccgagtggcggcagcagaaaccgcgaagcatcaggccaagtgtaacatctgcaaggaatgtcctattatcgggtttaggtatcgaagtcttaaacatttcaactatgatatatgtcagagttgcttcttcagtggacgagtggccaaggggcataagatgcactacccaatggtagaatattgcactccaactacatccggtgaggatgtccgggattttgccaaggttttgaagaacaagtttaggaccaagcgatatttcgccaagcatcctcggatgggatacctccctgtgcaaacggtgctcgagggggacaacatggaaacagacactatg

SEQ ID NO: 251337 - DNA, 3432 bp, synthetic construct
  misc_feature 1..3432: note = Description of Artificial Sequence: Synthetic coding sequence
  source 1..3432: mol_type = other DNA
atgctttggtgggaggaagtggaagattgttacgaacgagaagatgtgcagaaaaaaacatttacaaaatgggttaatgctcagttttcaaaatttggaaaacaacatatcgagaatctcttttctgatctccaggatggacgcagactgctagatctgcttgaagggctcacaggacaaaagctcccaaaagagaaaggatctacacgcgtgcatgcactcaacaatgtaaataaggctctgcgagtgctccagaataataacgtagacctcgttaatatcgggtcaacagatatcgtggatgggaaccacaaattaacactcgggcttatatggaatataatcttgcactggcaggtcaaaaatgtgatgaaaaatatcatggctggactccagcagacaaattccgaaaagatactactgtcgtgggtcaggcagtctacaaggaactacccccaggtcaacgtaataaatttcactacatcctggagtgatggactcgcactaaacgcactgatccattcccaccgccccgatctttttgactggaattctgtggtgtgccagcagtctgctacacaaagactcgagcatgcattcaatatcgccagatatcagttggggatcgaaaaactgctcgacccagaagatgtagacactacatatcccgataagaaatccatattaatgtatatcactagtctgttccaggtattgccgcagcaggtgtccatagaagcaattcaggaagtggaaatgctcccacggcctcctaaagtcacaaaagaggagcactttcagttgcaccaccagatgcattattctcagcagatcacagtttctcttgcccaggggtatgaaagaacatcttctcccaaaccaagatttaaatcttacgcctacacacaggcagcatatgtcacaacttctgatcctacacgatccccattcccctctcagcacctagaggctcccgaagataaatctttcgggtcttctctgatggaatccgaagtgaacctggatcggtaccagactgctcttgaagaagtgctctcctggctgctcagtgctgaagacactctacaggcccagggagaaatttcaaatgatgtagaagtggtgaaagatcagttccatactcacgaaggatacatgatggatttaacagctcatcaggggcgagtaggaaatatcctgcagctcggatccaaactgatcggaactggaaaactttccgaagatgaagaaactgaggtacaggaacagatgaatctactgaattcgcggtgggaatgcctaagggtggcttcaatggagaagcagtccaacctccacagagagataagttatgtcccttccacatacctaactgaaatcactcacgtgtcacaggcgttgctagaagtcgaacagctacttaacgctcctgatctgtgtgctaaagattttgaagatctctttaaacaggaagaatctctaaaaaacataaaggattctttacagcagtcttctgggcggattgatataattcactctaaaaaaacagcagctcttcagtccgcaacacccgtagaacgcgtaaaactccaggaagcgctgagtcagctggactttcagtgggaaaaagtcaataaaatgtataaggataggcagggacggtttgacaggtctgtcgaaaaatggcgccgatttcattacgatatcaaaatcttcaaccagtggctcactgaagccgaacagtttctgcgaaaaactcagattcctgaaaattgggaacatgccaaatataagtggtacctcaaggaactccaggatggaatcggacagagacagacggtggtgagaacacttaatgccactggagaggaaattatccaacagagttctaaaacagacgcttccattctccaggaaaagctgggaagtctcaaccttagatggcaggaagtctgcaagcagctatcagatcgcaaaaaacgactagaagaaacactggaaagactccaggaactccaggaagccactgatgaactagatcttaaactaaggcaagctgaagtgatcaaggggagttggcagcctgtcggggatctcttaatcgattctttgcaagatcacctagaaaaagtcaaagccctgcgtggggaaatcgctcctctgaaagaaaacgtctctcatgtgaacgacttggcaagacagctcactactctaggaatccagctgtccccatacaaccttagtacactcgaggatctgaatactcggtggaagttgctccaggtggccgtagaagatagggtgaggcagttacatgaagcccatagagatttcgggcccgctagtcagcactttctttccacatcagtccaggggccctgggaaagggccatttcccctaataaagtgccatattatataaatcacgaaacacagactacttgttgggaccaccccaaaatgacagaactgtaccagtcactagctgacctgaacaatgtccgcttcagtgcatatagaacagctatgaaactgcggagacttcagaaggctctctgtctggatctcctgagtctctctgctgcctgcgatgcgcttgatcagcacaatctgaagcagaacgatcagcccatggacatccttcagataataaattgccttacaacaatctatgatcgactggaacaggaacataataacctagtgaacgtgccactctgcgtggatatgtgcctaaactggctcctgaatgtctatgatactggacgaacaggaagaattcgagtgctatcattcaaaactgggattatctctctatgtaaagctcaccttgaagataaataccgatatctatttaaacaggttgcgtcatcaacaggattctgtgatcagcggcggctcggactgctccttcatgattccattcagataccacgccagctcggggaagtggcctcattcggaggatcgaatattgaaccttccgtaaggtcatgctttcagtttgctaacaataagcctgaaatcgaggctgcgctgtttctggattggatgcggctcgaacctcagtcaatggtatggttacctgttcttcaccgcgtggcagccgctgaaacagccaaacatcaggcaaaatgcaatatttgcaaagaatgcccaatcatcgggttcaggtaccgctctctaaaacatttcaactacgatatctgccagtcttgctttttcagtgggcgggtggctaaaggacacaagatgcactaccccatggttgaatattgcacaccaacaacatccggagaggatgttagggattttgcaaaggtactcaaaaataaatttcgcactaaacggtactttgctaaacatcccaggatgggatatctgcctgtccagactgtgctggaaggagataacatggaaacagacacaatg

SEQ ID NO: 251338 - DNA, 3432 bp, synthetic construct
  misc_feature 1..3432: note = Description of Artificial Sequence: Synthetic coding sequence
  source 1..3432: mol_type = other DNA
atgctgtggtgggaggaggtggaggactgttacgagcgcgaggatgtgcagaagaagaccttcaccaaatgggttaacgcccagtttagtaaatttggtaagcagcatatagagaaccttttttccgatttgcaggatgggcgccggctactggatctgctggaggggcttacaggacagaagttgcccaaagagaagggatctacaagagtacacgcccttaataacgttaacaaagcgctgcgggtgctccaaaataacaacgttgacctggtgaacataggaagtaccgatattgtggacggcaatcacaagcttacacttggtttgatctggaatattatactgcattggcaggtgaaaaatgtcatgaagaacattatggcggggttgcaacagactaattccgagaaaattctactgtcttgggtgcgccagtcaactagaaattatccgcaggtcaacgtgatcaacttcacaacctcgtggagtgacggactagcactcaacgcacttatccacagccacaggccggatctattcgactggaattcagttgtgtgtcagcagagcgcaacccagcggctggagcatgccttcaacattgcacgatatcaactcggcattgagaagctgctggaccccgaggatgtcgacacgacctatccagacaagaaaagtatcctcatgtatattaccagcttgtttcaggtcctgccccagcaggtttcaatcgaggctatccaagaagtggagatgctaccccggccacccaaagtgactaaagaggagcacttccagctgcaccaccaaatgcactattcccagcagatcacggtgagtctcgcacagggatatgagagaaccagttctccgaagccacgattcaagtcatatgcctacacgcaggcagcctacgtaacaaccagcgacccaacccgaagtcccttcccttctcagcatttggaagcaccagaagataaaagttttggaagcagtctgatggaatctgaggtgaacctcgatagataccagactgcactggaagaagtgctgtcatggctcctctctgccgaagataccctgcaggcccagggcgagatctctaacgatgtcgaagttgtgaaggaccagtttcatacgcacgaagggtacatgatggatcttaccgcacatcaggggcgagtgggcaacatcttgcagctgggcagtaaactaatcggcacaggtaagttgagcgaggacgaggagaccgaggttcaggaacagatgaatctgcttaattcacggtgggagtgtctgcgtgttgcctctatggaaaagcagtctaacctccaccgcgagatttcgtatgtgccatctacatatctaactgagatcactcatgtttcccaggctctgttggaggttgaacagctcctcaacgcgcctgacctgtgcgcgaaggacttcgaggatctctttaagcaggaggaatctctcaaaaacataaaggattccctacagcagagttctgggagaattgatatcattcattctaagaagacagcggcgctacagtcagcgactccggtggagagggtcaagcttcaggaagcgctatctcagctggacttccagtgggagaaagtgaataagatgtacaaagacaggcaagggcgatttgaccgatccgtcgaaaagtggcgccggtttcactacgatataaaaatctttaaccagtggcttaccgaggccgagcaatttctgaggaagacccagatcccagaaaattgggagcacgccaagtataagtggtacctaaaagaattgcaagatgggataggtcagcgtcagacggtggtgcggacactgaacgctaccggcgaagaaatcattcagcagagctcaaagaccgatgcaagtatcctccaggagaagcttgggtcccttaacctacgatggcaagaagtatgcaaacaattgtcagacagaaaaaagcgccttgaggagactctggaaaggttgcaggaactccaagaggccacggacgagctggatttgaagctcaggcaggccgaggtgataaagggatcatggcagccggtgggggatctcctcattgattccctccaggaccacctcgaaaaggtaaaggcactgaggggggagattgccccactcaaagagaacgtctcccacgtaaacgacctggctcgccaactcacgacactaggcatccagctttccccgtacaatctcagcactctggaggatttgaacactagatggaagctgctgcaggtagctgtagaggacagggtgagacaattacacgaagcacaccgtgatttcggacccgccagccaacatttcctttccacctcagtccaggggccgtgggagagggctatttcacccaacaaggtaccctactatataaatcacgagactcagaccacgtgctgggaccatcccaagatgaccgagctttatcaaagcctcgctgatctcaacaacgtcaggttcagtgcataccgcaccgccatgaagctgcggagactacagaaggccctgtgcttagatctcctgtctctctcagcagcctgcgacgccctagaccagcataatctcaagcaaaacgaccagccaatggatattttgcagatcatcaattgcttgacaacaatctacgatagactagaacaggagcataataacctcgttaacgtgccattatgtgtcgacatgtgtctgaactggctgctgaacgtgtacgacaccgggaggactggaaggattagagtgcttagttttaaaactggcataatctctttgtgtaaggctcatttggaagacaagtacaggtatctgttcaagcaggttgcatcttctaccggcttctgcgaccagaggaggctgggtctgttgctgcacgacagtattcagattccccgccagctgggagaagttgccagttttggcggctctaatatagaaccatcagtgcgaagctgtttccagtttgccaacaacaagcccgagatcgaagccgccctcttccttgattggatgcgactggaacctcagagcatggtttggttacccgtcctccaccgtgtggcggcagccgagaccgctaagcaccaggctaaatgcaacatttgtaaagagtgtcctataatagggttccgatatagaagcctaaaacacttcaattacgacatctgtcagtcctgctttttctccgggcgggtggccaaaggacacaagatgcactatccaatggtcgaatattgtacaccaaccacatctggggaagacgtgcgggactttgccaaggtgcttaagaataaatttcggactaagcggtattttgcaaagcaccccagaatgggttacctgccagtgcagaccgtccttgagggcgacaatatggaaactgacaccatg

SEQ ID NO: 251339 - DNA, 3432 bp, synthetic construct
  misc_feature 1..3432: note = Description of Artificial Sequence: Synthetic coding sequence
  source 1..3432: mol_type = other DNA
atgctctggtgggaagaagtcgaggactgttatgagcgggaggatgtccaaaagaagacatttactaagtgggtgaatgcccaatttagtaagtttggcaaacaacacattgagaacctgttttcagacctgcaggacggtcggcgcctgcttgatctgctggagggactgaccgggcagaagctgccaaaagagaaggggagcactagggtccatgcattgaacaacgtgaacaaggctttgcgggtgttgcagaataacaacgtggatctggtgaacatcggatccacagacatcgttgatggcaatcacaagcttactctggggctgatctggaatattattctgcactggcaggttaagaacgtgatgaagaatattatggctggactgcagcaaaccaatagcgaaaagatcttgttgtcctgggtccggcagtccacgcggaactatccccaggtcaatgttattaacttcaccacctcttggagcgacggtctcgcactgaacgctctcatccacagccaccgccctgacctgttcgattggaactcagttgtttgtcagcagtcagctactcaaagacttgaacatgcattcaatatcgcaagataccagctgggaattgagaagctcttggacccagaggatgtagacaccacctatcccgataagaagtctatcctcatgtacataacatccctgtttcaggtcctgcctcagcaagtgtccattgaagctattcaggaggttgagatgctccctcgcccgcctaaggtgacgaaggaagagcattttcagctccatcatcaaatgcattacagtcagcagattactgtatccctggcccaggggtacgaacgaaccagcagccctaagcctcggttcaagtcttatgcttatacccaggcagcttatgtcacgacaagcgacccgaccaggtcaccctttccctctcagcacctggaggcaccggaggacaagtcctttggtagctcactcatggaatccgaggtgaacctggaccggtatcagacagcgttggaagaagtgctctcctggcttctctccgcagaagacactcttcaagctcagggagagattagcaatgacgtcgaggtggtgaaggatcagtttcacacccatgagggttacatgatggatcttaccgctcatcaaggccgagtgggcaacatccttcagctgggtagcaagctcatcggcacagggaaactttcagaggatgaggaaacagaggtgcaggaacaaatgaatttgctcaatagtagatgggagtgtctgagagtggccagcatggagaaacaatccaatctgcacagagagatctcctacgtgccctctacctacctcaccgagataacccacgtctctcaggccctgttggaagttgagcagcttctcaacgcccccgatctgtgtgccaaagattttgaggacctgttcaagcaggaggagagcctcaagaatattaaagattcccttcagcagagtagcgggaggatcgatataatccactccaagaaaacagctgcattgcaatcagccacgcctgtagaaagggttaagctgcaggaggccctctctcaactcgattttcagtgggagaaggtaaataagatgtacaaagaccgccagggtcggttcgacagaagtgtggagaaatggaggcgctttcactatgacattaaaatcttcaaccagtggttgaccgaagccgaacagtttctcagaaagacacagatccccgagaattgggagcacgctaaatacaagtggtacctcaaggagctgcaggacgggatcggtcaacgccagacagtcgttcgcacactgaacgcaaccggggaagagatcatacagcagtcctctaaaacagatgcctcaatcttgcaagagaaacttgggagtttgaacctgcgctggcaggaagtgtgtaagcagctcagcgataggaagaagcgacttgaagagacgctcgagaggctgcaggagcttcaggaggccacagatgagctggacctgaaacttagacaggcagaagtgatcaagggctcttggcaaccggtgggggatttgctgatcgactccctccaggaccacctggagaaagtaaaagccctccgaggcgagattgcacctctcaaggaaaacgtgagtcatgtgaatgacttggctcggcaactcaccacactggggatccagctgagcccttacaacctctctaccctcgaggatctcaacactaggtggaagttgctgcaggttgctgttgaggaccgggtacggcagttgcacgaagcacatagagattttggccccgccagccagcattttctgagcactagtgtgcagggtccgtgggagcgggctatctctccaaacaaggtaccatactacataaaccacgaaacacagacaacttgctgggatcacccaaaaatgacagagctctatcaatccctcgctgacctcaacaacgtccggttctctgcataccggactgccatgaagctccgccggttgcaaaaagccctctgtcttgacctcctcagcctcagtgcggcctgcgacgctctcgatcagcacaacctgaaacagaatgatcaacccatggacattctgcagattatcaactgtttgacaacgatctatgatagactggagcaagagcataacaatctggtgaacgttcctctgtgcgtggatatgtgcctcaactggctgcttaacgtatacgacaccgggagaacgggacgaattagggtcctttccttcaaaacaggaatcatttctctgtgtaaggcccaccttgaggataagtaccgatatctgtttaaacaagtggcatcttccactggtttctgtgaccaacggagactgggactgctgttgcacgacagcatacagattcccagacagctcggggaggtggcttcttttggcggcagcaacatagaaccctctgtacgctcatgcttccagttcgccaacaataaacccgaaatcgaggccgcgctgtttctcgattggatgaggctggagccacagtctatggtgtggctgccggtgctgcatcgagttgcagccgccgagacagccaagcatcaggccaagtgcaacatctgtaaggagtgccctatcattggattccgctaccgctccctgaagcatttcaactacgatatctgtcagtcctgctttttctccggcagagttgccaaagggcataagatgcattatccaatggtggagtattgtacacccacaactagcggagaggatgtgagggatttcgcaaaggtgctgaagaataaatttcggaccaagaggtattttgccaaacacccccgaatgggttaccttccagtgcagacagtattggaaggggacaacatggaaacggacactatg

SEQ ID NO: 251340 - DNA, 3432 bp, synthetic construct
  misc_feature 1..3432: note = Description of Artificial Sequence: Synthetic coding sequence
  source 1..3432: mol_type = other DNA
atgctctggtgggaagaggttgaggactgttacgagcgggaggatgtccagaagaaaaccttcacaaagtgggtgaacgctcaatttagtaaattcggaaagcagcatattgagaacctgttcagcgacttgcaagatggacgacgcctgctcgacctactggagggattgaccggtcaaaagttaccaaaagaaaaaggtagtacgagagtacacgcccttaataatgtgaataaggcactgcgggtgctgcagaacaataatgtcgaccttgtcaacatcggaagcactgatatcgtggatggaaatcataagttgacccttggtcttatttggaacataatacttcactggcaggtgaaaaacgtcatgaaaaatatcatggccggccttcagcagacgaactcagagaaaattttgttaagttgggtgaggcagtccactaggaattatccccaagtaaatgttatcaactttaccacttcttggtcggacgggcttgccctaaatgccctcattcactctcatcgacccgacctcttcgactggaattccgtcgtatgtcagcagtccgcgacacagcgcttagaacacgctttcaacatcgcaaggtaccagcttgggatcgagaagcttctggatccggaggatgtcgataccacctacccagataagaaatccatcctgatgtacattacatctctcttccaagttctgcctcagcaggtatccatcgaagcaatccaggaggtcgagatgctgccaaggcccccaaaggtgaccaaagaggagcatttccaattgcatcatcagatgcattactctcagcagataaccgtgtctttagcccaggggtatgagcgtacttcatcgccgaagcctcgctttaagtcttacgcttatacccaggctgcatacgttactacctctgatccaacgcggtcgcccttccctagtcagcaccttgaggccccagaggataaatccttcggatcatctctcatggaaagcgaggtcaacctggaccgctatcagactgccctcgaagaggtcctatcttggctgctgtctgcagaggacacgctacaggcacagggagaaataagtaatgacgtcgaagtagtcaaggaccaatttcatactcacgaagggtacatgatggacctgactgcccatcaaggccgggtgggtaatatcctccaactaggaagcaagctcattggcacaggcaagttgtccgaggacgaggagacggaggtgcaggaacaaatgaaccttctgaactctcgttgggagtgcctcagagtggcttcaatggaaaaacaaagtaatctgcaccgagagatctcttatgtacccagcacttacttgacggaaattactcacgtttctcaggccctactggaggtagaacagttactcaatgcacctgatctctgtgcgaaggacttcgaggatctgttcaaacaagaggagagtttgaaaaacattaaagactccctgcagcagtcttctgggagaatagacatcattcattctaagaagactgctgcgctgcagtccgctacaccagtagagcgagttaaattgcaggaagcgctcagtcagttggactttcagtgggagaaagtgaataaaatgtataaagaccgtcagggtagattcgacagaagcgtggaaaagtggcgccggtttcactacgacatcaagatcttcaaccagtggctaacagaggccgaacagttcctgcgcaagacccagattcccgagaattgggaacatgctaagtacaagtggtacctgaaggagttgcaggatggcattggccagcgacaaacggttgttaggactctgaatgccaccggtgaagaaatcattcagcagagtagcaagacggacgcaagcatcctgcaggagaagctgggaagcctaaacttgcggtggcaggaagtgtgtaagcagctctcagaccggaaaaaacgtctggaggagacactcgaacgtctgcaagagctgcaggaggctacggacgagctggatctcaagttaagacaagcagaagtgattaaagggtcctggcagccggtcggagatctgttgatagactcactgcaggatcaccttgaaaaggtaaaagcgctgcgtggggagatagccccgctgaaagaaaatgtcagtcatgtcaatgatttagctcgacaactcaccacacttgggatccagctttccccatacaatctcagcaccctcgaagatttgaacacaagatggaagctgctccaggtggctgtggaggatagggtacggcagctccacgaagcgcaccgtgattttggaccggcatcacagcatttcctaagcacatcagttcaaggcccatgggaacgggcaatatcccccaataaagtgccctactacattaatcacgaaacacagacaacctgttgggaccaccccaagatgactgagttatatcagtccctggcagacctcaacaacgtccgcttctcagcttaccgtaccgccatgaagttgagacgtcttcaaaaggctttgtgtttggatctgctatcactctcagccgcctgcgacgcactggatcagcataaccttaaacaaaacgaccagcccatggacatcttacagattatcaattgtcttacgaccatttacgaccggttagaacaagagcacaataatctggtgaacgtgccactgtgtgtggacatgtgcctgaactggctgctgaatgtttacgatacaggacggacggggcgtataagggttctgtcttttaaaacaggtatcatctccctttgtaaggctcacctcgaggacaagtacagatacctgttcaaacaggttgcgtcctccacagggttttgcgaccaaaggcggttaggcctcctcttacacgatagcattcagatcccacgccagttaggcgaagtcgcatcattcggcggaagtaacatcgagcctagcgtgagatcatgttttcagtttgcaaataacaaacctgagattgaggccgcgttgttcttggattggatgcgcctggagccccagagtatggtgtggcttcctgtcctgcaccgggtggcagcagcagagacagccaagcaccaagccaaatgtaatatctgcaaagagtgcccaattattggatttcgttacagatcactcaaacattttaactacgacatctgccagagctgttttttctcaggaagggtcgcgaaggggcataaaatgcattaccccatggtcgaatattgcacccccacgacctcaggagaggacgtgagggacttcgccaaagtgctgaagaataagtttagaaccaagaggtactttgctaagcacccccggatgggatacctgcccgttcagaccgtgctggagggggataatatggaaacggacacaatg

SEQ ID NO: 251341 - DNA, 3432 bp, synthetic construct
  misc_feature 1..3432: note = Description of Artificial Sequence: Synthetic coding sequence
  source 1..3432: mol_type = other DNA
atgctctggtgggaagaagtggaggattgttacgaacgagaggacgtccagaaaaagacgtttactaagtgggtcaacgcacagttctcaaagttcggaaaacagcatattgaaaatcttttctcagatctccaagacggtcggcgcttgcttgaccttttggaaggcctgacgggccaaaaactgcccaaggagaagggctcaacccgggtgcatgctctcaataatgtgaacaaagcccttcgcgtgcttcagaataacaatgtggacctggtcaacattggatccactgacatcgtcgacggaaaccataagttgacgcttggtctgatttggaacattatactgcattggcaagtgaagaacgtgatgaaaaacatcatggcagggctgcaacagactaactccgagaaaattctccttagctgggtgagacaatccacgcgcaactacccccaagtgaacgtgattaactttactactagctggtcggatggcttggcactgaatgcgttgattcactcccatcgccctgacctgttcgattggaatagcgtggtgtgccaacagtcggcaactcagagactggaacacgcgtttaacatcgctagataccagctgggcatcgaaaagttgcttgatcccgaagatgtcgacaccacttatccggacaagaagtcaatcttgatgtacattactagcttgtttcaggttcttcctcaacaagtctcaatcgaagcaatccaggaagtcgaaatgctgccccgtcctccgaaagtgaccaaggaagaacacttccagctgcaccaccaaatgcattacagccaacaaattactgtgtccctggctcaggggtacgaaaggacctcgtcaccgaagccacggttcaaatcatacgcttacactcaggcggcgtatgtcaccacttcggatcctacccggtcgccatttccatcacaacatcttgaggcgccggaagataagtcgtttggaagctcgcttatggaatccgaggtcaatctcgatcgctaccagacggcactggaagaagtgttgtcgtggctgctgtcagcagaagataccctccaagcacaaggggaaattagcaacgatgtggaggtcgtcaaagaccaattccatacccatgaaggttatatgatggacctgactgcgcatcaaggacgggttggaaacattcttcagctgggctccaagctgataggcactggtaagctgtcggaggacgaggagactgaagtgcaagagcagatgaatcttctgaatagcagatgggaatgcctgcgcgtcgcatctatggagaagcaatccaatttgcatagagagatcagctacgtgccatccacttatcttactgaaattacccacgtctcacaagcgttgctggaagtcgaacaactgctgaatgctcctgacttgtgtgcaaaggactttgaggatttgtttaaacaggaggagtcactgaagaacattaaagacagcctccagcaatcgtccggaagaattgacatcatccactcgaagaaaaccgcagccctgcaatcggcaaccccagtggaaagagtgaaacttcaggaggccctgtcacagcttgatttccaatgggaaaaggtcaacaaaatgtacaaggatcgtcagggtcgctttgataggtctgtggagaaatggcgaagatttcactacgacataaagatattcaatcagtggcttactgaagcagaacagtttcttcgcaagactcagattccagaaaactgggaacatgcaaaatacaagtggtacttgaaggaacttcaggatgggataggtcaaagacagaccgtggtccgaactcttaatgcaaccggagaagagattatacaacagtcatccaagaccgatgcatcaattttgcaagagaagctcggtagccttaacttgcgatggcaagaagtctgtaagcaactttcagataggaagaagcggcttgaagagactctggagagactgcaggagcttcaggaggcaactgatgaacttgatctgaagctgcggcaagcagaagtgataaagggatcgtggcaacctgtcggggaccttctcattgactccttgcaagatcatcttgagaaggtgaaagcccttaggggtgaaatcgcaccgttgaaagagaatgtttcccatgttaacgatctggcgcgtcaactgaccaccctcggaattcaactgtccccctacaacctgtccacccttgaagatctcaacactagatggaaactgttgcaggtggccgtggaagatcgcgtgcgccaattgcatgaagcacaccgagattttggaccagcgtcccagcactttctgtccacctccgtgcaaggaccttgggaacgggccatttcacccaacaaggtgccttactacatcaatcacgaaactcaaaccacctgctgggaccaccccaaaatgactgagctgtaccaaagccttgcagatctgaacaacgtgagattttcggcttacagaaccgctatgaagctgcgccgactgcaaaaagccctctgtctggatctgctcagcctttcggcggcctgcgacgcccttgatcagcacaaccttaagcagaacgaccaacctatggatatactgcagatcattaactgtcttactaccatttacgaccggcttgagcaggaacataacaatctggtgaacgtcccactttgtgtggatatgtgtcttaattggcttcttaatgtgtacgataccgggcgtacgggaaggatccgggtgctttcctttaagactggaatcatcagcctgtgcaaggcacatctggaggacaagtacagatacctctttaagcaggtggcctcatcgaccggtttctgtgatcagcggagactgggactgcttcttcatgattccatccaaattcctaggcagcttggcgaggtggcgtcgttcggagggtcgaatattgagccatcggtgagatcgtgctttcaatttgcaaacaacaagcctgaaatcgaggccgcactttttctcgattggatgaggcttgaaccccagtcaatggtctggctccctgtgctccatcgagttgcggcggcagaaaccgcaaagcatcaagccaaatgtaacatctgcaaggaatgtcccattataggatttagataccgatccctgaagcatttcaactacgatatatgtcagtcgtgttttttctcgggacgggtggctaagggtcacaagatgcactaccctatggtggagtactgcacccctactacctcgggtgaagatgtccgcgattttgccaaggtgctgaagaataagttccgcaccaagcgctactttgcaaaacatccacgaatgggttacttgccagtccaaaccgttctcgaaggagacaatatggaaactgatacgatg

SEQ ID NO: 251342 - DNA, 3432 bp, synthetic construct
  misc_feature 1..3432: note = Description of Artificial Sequence: Synthetic coding sequence
  source 1..3432: mol_type = other DNA
atgttgtggtgggaggaggtcgaagattgttacgagcgcgaggacgtgcagaagaaaacttttaccaagtgggtgaatgcacagttttccaaattcggtaagcaacacattgagaatctgtttagcgacctgcaggacggacgtagactccttgacttgcttgaaggattgacgggacaaaaacttccaaaagaaaaagggtcaactcgagtgcatgctcttaacaacgtcaataaggctcttcgcgtcctccagaataacaatgtcgatctggtgaatattggatcgactgatattgtggatggtaaccataagctgacccttggactgatctggaacatcattttgcattggcaagtgaagaacgtgatgaaaaacattatggccggccttcagcagaccaactcagaaaagattctgctttcctgggtgcgacaatccacccgcaactaccctcaagtgaacgtcattaactttaccacttcgtggagcgatggtctggcacttaatgcacttatacattcccaccggcctgatctgtttgattggaactcggtggtgtgccaacagtccgcaactcaacggcttgagcatgcattcaacattgcaagataccaacttggaattgagaaacttcttgatccagaagatgtcgacaccacttacccagacaagaagtccattctcatgtacatcacctcgctcttccaagtgctgcctcaacaagtctcgatcgaagcaatacaggaagtcgagatgcttcctagacctcctaaggtcactaaggaagaacatttccaacttcatcatcaaatgcattactcccagcagattactgtgagccttgcacagggatacgaaagaacttcctcccctaagccacgctttaagagctatgcatacactcaggcagcctacgtgaccacctcagaccctaccaggtcgccctttccatctcaacatcttgaagcacctgaagataagtcattcggcagttccctcatggaatcggaagtgaacctggatagatatcaaacggcactcgaagaggtgctcagctggcttctttcagccgaagatactctgcaagcacagggagaaatttcgaacgatgtggaggtggtcaaagaccaattccacacccacgagggttacatgatggatctcacggcacatcagggacgcgtgggaaacattcttcagctgggaagcaagttgataggaaccgggaagctctccgaagatgaggagactgaagtgcaggaacaaatgaatctcctcaactcgagatgggagtgtcttagggtcgcatcaatggaaaagcagtcaaatctgcatagagaaatatcatacgtgcctagcacttacttgactgaaatcacccacgtgtcgcaggctctgcttgaggtggaacaactcctcaacgctcctgatctttgtgcaaaggattttgaagatctgttcaagcaggaggagagcttgaagaacattaaagactcgctgcagcaaagctccggccggatcgatatcattcactcgaaaaagacggcagcactgcagagcgcaactccagtcgagcgggtgaaacttcaagaggccctttcgcaacttgatttccaatgggaaaaggtgaacaaaatgtacaaggatagacaaggtagatttgacaggtcagttgagaagtggagacgcttccattacgacataaagatcttcaatcagtggctgactgaagcggaacagtttctgaggaaaacgcaaattcctgaaaattgggagcatgcgaagtacaaatggtacctcaaggaactgcaggatggcataggacaaagacaaaccgtggtcaggaccctcaacgcaactggagaggagatcattcagcaatcatccaagactgatgcatcgattcttcaagaaaaactggggagccttaatcttcgatggcaggaggtgtgcaagcaactctcagatcgtaaaaagagactcgaggaaaccttggaaaggctgcaagagttgcaagaagcaactgatgagcttgacctgaaacttcgccaggccgaagtgataaagggatcatggcagccagtgggtgacctgctgattgattcacttcaggatcatttggagaaggtgaaggcactgcggggggagattgctccccttaaggagaatgtctcgcacgtgaacgatcttgcaagacaacttaccacgctggggattcagctttcaccttacaacctgtccactctggaggatcttaatactcggtggaagctcctgcaggtggcagtggaagatagggtgcgccaactgcatgaagcacatagagattttggaccagcgtcgcagcactttcttagcacttctgtccaaggaccctgggagagggccatctcgcccaacaaagtgccttactacataaaccatgaaactcaaactacctgttgggatcatccgaagatgaccgagctgtaccaaagcctggcagatctcaataatgtccggtttagcgcgtacagaaccgcaatgaagctcagaaggctgcagaaggcattgtgtcttgacctcctgtcccttagcgcagcgtgtgatgcactggatcagcataatctgaaacagaacgatcagccaatggacattctgcagataatcaattgccttactactatctacgatcgcctcgaacaggaacataacaatcttgtgaacgttccactttgtgtggacatgtgtctgaattggcttctgaatgtgtacgacaccggtcgaactggacgtattcgcgtgctctcctttaagactggtatcattagcttgtgcaaggcccatctggaggacaagtatcggtatctgttcaaacaagtagcctcgtctacgggattctgtgatcaacgcaggcttggccttctcctgcacgatagcatccaaatccccaggcagctcggggaagtggcatcatttgggggttcaaacattgaaccttcggtgagatcctgttttcaatttgcaaataacaagcctgagattgaggctgcactgtttctggattggatgcggttggagcctcaatcgatggtgtggcttcccgtcctccatcgagtcgccgcagctgaaaccgcgaagcaccaggcaaagtgcaatatctgtaaggaatgtccgattattggtttcagataccgctcgcttaaacactttaactatgatatttgccaatcctgtttcttttcggggagagtggcaaaaggacataagatgcattacccaatggtggagtactgcactcctacgacttccggggaagatgtcagagactttgccaaggtcctcaagaacaaatttcgtacgaagcgctacttcgctaaacatccaagaatgggatacctgccagtgcagaccgtgcttgagggtgacaacatggaaaccgataccatg

SEQ ID NO: 251343 - DNA, 3432 bp, synthetic construct
  misc_feature 1..3432: note = Description of Artificial Sequence: Synthetic coding sequence
  source 1..3432: mol_type = other DNA
atgctgtggtgggaagaggtggaggattgctatgaacgggaagatgtgcaaaagaagacttttacaaagtgggttaatgcccagtttagtaagtttgggaagcagcacatcgagaatctgttttccgacctccaggatggtaggcggttgctggacctgctcgaaggcctgactggccagaaactacctaaggagaaaggctctaccagagtacacgcccttaataatgtgaacaaagcgctgagagtccttcagaataataacgtggacctggttaacataggatcgacagacatcgtggatgggaatcataaacttactctcgggctgatctggaatatcatactacactggcaagtaaaaaacgtgatgaagaacatcatggccggactgcagcaaacaaattccgaaaagatcttactttcgtgggtgagacagagcactcgcaattatccccaggtgaatgtgataaactttaccacctcatggtcagatggcttagctcttaacgcactcatccactcccaccgccccgaccttttcgactggaactccgtggtgtgccagcagtccgccactcagaggctcgagcatgccttcaatatcgccagataccagctgggtattgagaaattgttagacccagaagacgtggacactacttatcccgacaaaaaaagtattctgatgtacattacatccctgtttcaggtgctcccccaacaagtctccattgaggctattcaggaagtggagatgctccctcgaccccctaaggtgactaaggaagaacattttcagctgcaccaccagatgcattacagccagcaaatcacagtatcattggcgcagggctacgagcgcacttccagccctaaaccgagatttaagagttatgcttatacgcaggcagcctacgtgacgacttccgaccccactaggtctccctttccctcccagcaccttgaggctcctgaggacaagagttttggaagtagcctaatggaatcagaagttaatttggaccggtaccagacagcactggaggaagtgctgtcatggctgctgagcgccgaggataccctgcaggctcagggcgagataagtaacgacgtcgaggtcgtcaaagatcaattccatacacacgagggttacatgatggacctcaccgcccaccaaggacgggtgggcaatatattacagctaggctctaagctgatcgggaccggaaagttgtccgaagatgaagagaccgaggtgcaggagcagatgaatctgctgaactcacggtgggaatgtctgagggtggctagcatggaaaaacagtccaatctacaccgtgagatatcctacgtgccatccacttacctcacggaaatcacacacgttagccaggccttgcttgaggtggagcagctgttaaacgcaccggatctgtgtgctaaagacttcgaggacctgtttaaacaggaggaatcactgaaaaatattaaggatagtctccagcagtcaagcggccggatagatatcatccacagcaaaaaaactgcggccctacagtctgccaccccagtggaacgggtgaagttacaggaggcgttgtcacaactggacttccaatgggaaaaggtgaataagatgtataaagatcgtcagggccgcttcgaccggagcgtggagaagtggcgccgcttccactatgatataaaaatcttcaatcaatggttgacagaagcggaacagtttctacggaaaacgcaaattcctgaaaattgggagcatgcaaaatacaagtggtacctcaaagaactccaggacggaataggccagcggcagacagtggtgcgaacactaaacgctacaggggaagagatcatccaacaatcatctaagaccgacgccagtatactgcaggagaaactgggaagcttgaatctgcgctggcaagaagtgtgcaaacagttgtccgatcgaaaaaagaggcttgaggagacgctggagaggctgcaagagctgcaggaagcgacagacgaattagaccttaagttgcgacaggccgaagttatcaaaggatcgtggcagcccgttggggacctgctgatcgacagccttcaagaccatttagagaaggttaaggcgctgaggggtgaaattgctcccctgaaagaaaacgtgagccatgtcaatgaccttgcccggcagctgactaccctagggattcaattaagcccatataacctatcaacactggaggacctgaatacgcggtggaaacttctgcaggtggcagtcgaggaccgggtgaggcagctgcatgaagcacatagagatttcggacccgcctcgcagcacttcctctctacctcagttcaggggccttgggaacgcgcgatcagtccaaataaagttccatattatatcaatcacgaaacgcagaccacatgctgggaccaccccaagatgaccgaactgtaccagtctcttgccgatctaaacaatgtgagatttagcgcctatagaaccgccatgaaactgaggagactgcagaaagctctttgtctggatctcctgtctttgtccgccgcctgcgatgccctggaccagcacaacctgaaacagaacgaccagcccatggacattctgcagattattaactgcttgactactatctacgaccgtttagaacaagagcataataaccttgtcaatgtgcccctgtgtgttgatatgtgtctcaattggctgctaaacgtgtacgacaccggacgtaccggcagaatcagggtgctaagctttaaaaccgggataatctcactatgtaaggctcatcttgaggataagtataggtacttatttaaacaggtggcttcttccacaggtttttgcgaccagcgacggctcggactgcttctgcacgattctatccagattcctaggcagttgggtgaggttgcctccttcggggggagcaacattgaacccagcgtgcgaagctgttttcagtttgcaaataataagccggagatagaggccgcattattcctcgattggatgagacttgaaccccagagcatggtctggcttccagttttgcatcgagtggccgcggctgagaccgcaaagcaccaggccaagtgtaacatttgcaaagagtgtcctatcattgggttccggtaccggtccctgaagcactttaattacgacatttgtcagtcatgcttcttctccggcagagtcgcgaaggggcacaaaatgcattatcctatggtagaatattgcactccgaccacttccggcgaggatgtgagagactttgctaaagtcctaaagaacaaattcagaacgaagcgatacttcgccaaacatcctcgaatgggttacctgccagtacagactgtgctggaaggagacaacatggagaccgatacaatg

SEQ ID NO: 251344 - DNA, 3432 bp, synthetic construct
  misc_feature 1..3432: note = Description of Artificial Sequence: Synthetic coding sequence
  source 1..3432: mol_type = other DNA
atgctatggtgggaagaggtggaagattgctacgagcgcgaagatgtgcagaagaagaccttcacaaagtgggtcaacgcccagttctccaagttcggcaagcagcacatcgaaaaccttttttcggacctccaggatggcagacgtctcctcgacctgctcgagggcctgaccggccagaagctgcccaaggaaaagggctcgacccgtgtgcacgcgcttaacaacgtcaacaaggctttgcgggttcttcaaaacaacaatgtcgaccttgtcaacatcggaagcactgatatcgtcgatggaaaccacaagctcaccctagggctgatctggaacattatcttgcactggcaggttaagaacgtcatgaaaaatattatggcgggcctgcagcagacgaactcagaaaagatcctgttgtcttgggtcaggcagagtacgcgtaactatcctcaggtgaacgttattaacttcacaaccagttggtccgatggcctcgcactgaacgcgcttatccactcccaccgacctgacctgttcgattggaattccgtggtatgtcagcaaagcgcgacccagcgcttggagcatgctttcaacatcgcccgatatcagctgggcatcgagaagcttcttgaccctgaggatgtggacaccacttaccctgacaagaagagcatactcatgtacatcaccagcctttttcaggttctccctcaacaagttagcattgaggcgatccaggaagtcgagatgctgccccgccccccaaaggtcacaaaggaggagcacttccagctccaccaccaaatgcactacagccagcagattacagtttccttggcacagggctacgagcggacctcctctcccaagcctcggttcaagagttacgcctacacacaagcggcttatgtcacaacctccgatccgacccgttcccccttcccttcccaacacctcgaagccccggaggacaagtcttttggttcttccttgatggagagcgaagtcaacctggatcggtaccagacggccctggaggaagtgttatcttggctgctcagcgctgaagacaccctccaggcgcagggcgagatctcaaacgacgtcgaggtcgttaaggaccagttccacacacatgagggctacatgatggatctgactgcgcaccagggcagagtcgggaacatcctccaactcggtagcaagctgataggtaccggaaaactttcagaagacgaggagaccgaggtccaggagcagatgaacctcctgaactcgaggtgggagtgtttgcgcgtggcgagtatggagaagcaatctaacctgcatagggagatcagctatgtgccctcgacgtatctgacggagatcacgcacgtcagtcaggccctgctcgaggtggagcagttgttgaatgcacccgatctctgcgccaaggattttgaggatctgttcaagcaggaagagtctctcaagaatattaaggactctttacagcagtcgtccggtcgtatcgacattatccattcgaagaagaccgctgccttgcagtccgccacaccggttgagcgcgttaagctacaggaagcgcttagccaattggattttcagtgggagaaggtcaataagatgtacaaggatcgtcagggacgcttcgaccgtagcgtcgagaagtggcggcgattccactatgacatcaagatcttcaaccagtggctcaccgaggccgagcaattcctgagaaagactcagattcccgaaaattgggaacatgccaaatacaaatggtatttgaaggaattgcaagatggcataggccaacgccagacagttgttcggaccctgaacgccacgggcgaagagatcatccagcagtcgagcaagaccgatgcctccattctgcaagagaagctgggcagcttgaacctccggtggcaggaggtctgcaagcagttgtcggaccgcaaaaagcggctcgaggagaccttggagcgtctccaggaactccaggaagccacagacgagctcgaccttaagctccgtcaggccgaggtgatcaagggctcttggcagcctgtgggcgatctgttgatagattctttgcaagatcacctggagaaggtcaaggccctccggggcgagatagctcctcttaaggaaaacgtaagtcatgtgaacgaccttgcccgacagcttaccactctcggtatccaacttagcccctacaacctcagcacgttggaggacctgaacacccgctggaagttgctacaggtcgccgtcgaagaccgggtgcgccagctccacgaggctcatcgagatttcggccctgcgtcccaacacttcctgagtacttccgtgcaggggccctgggagcgcgctatcagtcccaacaaggttccctactacattaaccatgagacccagaccacttgttgggaccacccgaagatgaccgagttgtatcaatccctcgcggaccttaacaacgtccggttctccgcctaccgtactgctatgaagttgcggcggttgcagaaggctttgtgccttgacctcttgtctctgtcggccgcctgcgacgccctagaccaacataacttgaagcagaacgatcagccgatggacatcctacagatcatcaattgcctgacgaccatttatgaccgtctggaacaagaacacaacaacctcgtcaacgtgcctctatgcgtagacatgtgccttaattggcttttgaacgtctacgacacaggtcgtacaggccgtatccgtgttctgtccttcaagaccggtatcatctccttgtgcaaggcccaccttgaggacaagtatcgctacctcttcaagcaggtcgcctccagcaccggcttctgtgaccagcgacgtttgggccttctgctccatgattccattcaaattccccgtcagttgggcgaggttgcctctttcggaggctcgaacatcgagccgagcgttcgcagttgctttcagttcgccaacaacaaacccgagattgaagctgctctgttcttggattggatgcgtctagagccccagtccatggtttggctcccggtcctccatcgtgtcgccgccgctgagacggccaagcatcaagctaagtgtaacatctgtaaggagtgccctattattggatttcgttacagatccctgaaacactttaactacgacatttgtcaatcgtgcttcttctctggccgtgtcgcgaagggccataagatgcactatcccatggtcgagtactgtacaccgaccactagcggtgaagacgttcgcgactttgccaaggtcctgaaaaacaagtttcgcactaagaggtacttcgccaaacatccgaggatgggttacttgcccgtccagacagtactcgagggtgataacatggagaccgatacaatg

SEQ ID NO: 251345 - DNA, 3432 bp, synthetic construct
  misc_feature 1..3432: note = Description of Artificial Sequence: Synthetic coding sequence
  source 1..3432: mol_type = other DNA
atgctgtggtgggaggaggtagaagattgctacgagagagaggatgttcaaaagaagactttcaccaaatgggttaacgctcaattcagcaagttcggtaagcagcatattgaaaacctgttctctgatctgcaggatggtagaagactgctggatcttctggaagggctgacgggccagaagcttcccaaggagaagggcagcacacgcgtgcatgccctcaacaatgtgaataaagcccttagggtgctgcagaataataacgtagaccttgttaacataggctccacagacatcgtggatggtaaccacaaactgacacttggtctcatttggaacatcattcttcactggcaggtcaaaaacgtgatgaagaatatcatggccggacttcagcagactaacagtgagaaaatcctgctctcatgggtgcggcagagcacaagaaattacccgcaggttaatgtcatcaactttactacctcctggtccgacggtctcgcactcaacgctctcattcatagccatcgcccagacctcttcgattggaattccgtcgtgtgccagcagagcgctacccagcgccttgaacatgccttcaatattgccagatatcagttgggtatagaaaaactcctggatcccgaggacgtagacactacctatcccgacaagaaatccatactcatgtacatcaccagcctgtttcaggtcctcccacagcaggtgagtattgaggccatacaggaagtcgaaatgctccctaggccacccaaggttacaaaagaggagcactttcaactccaccaccagatgcactactctcaacagataacggtctcactggcgcaaggctacgagagaacctcctctcctaagccccggtttaagtcatatgcgtatacccaagctgcctacgttactaccagtgatccaacgcgatcccccttcccttctcaacacctggaggcccccgaagacaaaagctttggctccagtcttatggaatcagaggtgaacctggaccgctatcagacagctctggaagaagtcctgagttggctgctgtccgccgaagacacccttcaagctcaaggagagataagtaacgatgtggaggtcgttaaagatcagttccacacacacgagggttatatgatggacctcaccgcccaccagggcagggttggaaatatcctgcagctggggtccaagctgattggcaccggaaaactgtccgaagatgaagaaactgaggttcaggaacaaatgaacttgttgaattcccgctgggaatgccttagagtagctagtatggagaagcagtcaaatctgcatcgggagatctcttatgtaccatctacgtatctgacagaaatcacgcatgtctcccaggcactgctggaagtcgaacaactgcttaatgctcccgatctctgtgccaaggactttgaggacctgttcaagcaggaggagagtctcaaaaacattaaagacagtttgcaacagtccagcggccggatcgacataatccactcaaaaaagaccgctgctctgcaaagcgcaaccccagtagaacgagttaaactgcaagaggcactgagccagttggacttccagtgggaaaaggttaataaaatgtataaggacagacaaggtcgattcgacaggtctgtagagaaatggaggcggtttcattacgatatcaagatattcaaccagtggctcactgaggctgagcaattcctgagaaagacgcagattccggaaaattgggaacatgccaagtataagtggtacctgaaggagctgcaagacgggatcggccagcgccagacagtcgtccgcacactcaacgctaccggcgaggagatcatccagcagagctccaagacagatgcctcaatactgcaggagaagctggggtccttgaacctccgctggcaggaggtgtgtaaacaactgtccgataggaagaaacgcctggaagagacactggaaagactgcaggaattgcaggaagcaaccgacgaactcgatcttaaactgcgccaggccgaggtgatcaagggttcctggcagcctgtgggcgatctgttgatcgactccctccaggatcatctggaaaaggtaaaggccctgaggggagagattgcccctctcaaggagaacgtcagtcacgtcaacgatctggccagacagttgacgaccctggggatccaattgtctccatacaatctgtctaccctggaggatctgaacaccaggtggaaattgctgcaggtagccgtcgaagatcgcgtaaggcagttgcacgaagcccaccgcgattttggtcctgcctcccaacacttcctctccaccagcgttcaggggccctgggagcgcgcaatcagccccaataaggtgccctattacattaatcacgaaactcagactacatgttgggatcatcccaagatgactgagctctatcagagccttgcagacctcaataatgtccggttctccgcgtaccggactgcaatgaaactccgcagactgcaaaaggccctgtgcctggatctgctgtctctgtccgcagcctgcgacgctcttgaccaacacaatctgaaacagaacgaccaaccaatggacatactgcagattataaactgtctgaccactatctatgaccgccttgagcaggagcacaacaacttggtcaatgtgccactgtgcgtcgatatgtgtttgaactggctgctgaacgtgtacgacactggtcggacgggtagaattcgcgttctgtcttttaagacaggtatcatctctttgtgcaaggctcaccttgaagataaatacaggtacctgtttaagcaggttgcgtcatccactgggttctgcgaccagaggagactcggtctgctcctgcacgacagtatccagattcctcgccagctgggggaggtggcctcattcggggggtctaacatcgagccatctgttaggagctgtttccagttcgccaacaacaaacccgagatcgaggccgcgctcttcctggattggatgaggctggaacctcaatcaatggtatggctgcccgttctgcatagagtggcagccgccgagacagccaagcatcaggccaagtgcaacatatgtaaagaatgtcctatcattggcttccggtaccgctccttgaaacattttaattacgatatctgccagagctgttttttctctggtcgggtcgcaaaaggccacaaaatgcattaccccatggttgagtactgtacgccgaccacctccggcgaagacgttagggatttcgcaaaggtgttgaagaacaaattcaggacaaagcgctactttgcgaaacatcctcggatggggtatctccctgtccagaccgtcttggagggcgacaatatggaaacagacactatg

SEQ ID NO: 251346 - DNA, 3432 bp, synthetic construct
  misc_feature 1..3432: note = Description of Artificial Sequence: Synthetic coding sequence
  source 1..3432: mol_type = other DNA
atgctgtggtgggaagaagtggaggattgctacgagagggaggatgtccagaagaaaacttttactaaatgggtgaacgcccagttttccaagtttggaaaacaacacatcgaaaacctcttcagtgacttgcaggatggccggaggctgctggatctgctggagggcctcaccgggcagaagttaccaaaggaaaagggaagcacccgggttcacgccctcaataacgtgaacaaagccttgcgagttctccagaataacaatgttgatttagttaacattggcagtactgacatagtggacgggaatcacaagctcacactcggcctgatctggaatatcattttgcactggcaggttaaaaacgtgatgaaaaatataatggcagggctgcagcagacaaactctgaaaagattctgctgtcttgggtaagacagagtaccaggaactatccccaggttaatgtcattaattttactactagttggtctgatggcctggccttaaacgctctcatacactcccaccgacctgatttgtttgattggaacagtgtggtttgccagcagagcgccacccaacggcttgagcacgcatttaatatagcacgttatcagctcggaatcgaaaagcttctggacccagaggatgtagacaccacataccccgacaaaaagagcattttgatgtacatcacctcattattccaggttctgccacagcaagtctcgattgaagccatccaagaagttgagatgttgccgaggcctcccaaggtgacaaaagaagaacatttccaattacaccaccagatgcattactctcagcagattaccgtgtctttagcgcaggggtatgagagaacctcaagtcccaagccacgatttaagtcatacgcatatactcaagctgcctatgttaccacgagtgatcccactaggtctccctttccctctcagcacctggaagcccctgaggacaagtcgttcggctcttcgctcatggaaagcgaagtgaacttagatcgatatcagacggctctagaggaggtgctgtcctggcttctttcggccgaggatacactccaggcgcagggagaaatcagcaacgatgtagaggtggttaaagatcagttccatacacacgagggctatatgatggacctgactgcccatcagggccgcgttggcaacattctacagctggggtccaagctcatcggaaccggcaagctgtccgaagatgaggaaacagaggtgcaggaacagatgaatctgctcaattcacggtgggagtgcctgcgagtggcctcgatggaaaagcagagcaacctccaccgagaaatctcttacgtgccgtcaacttacctcacagaaatcacacacgtcagccaggctctactcgaggtggaacagctgttgaatgcccccgacctctgtgccaaagattttgaggacctgttcaagcaggaggagagtttaaaaaacatcaaggactctcttcaacagtcctccggaagaattgatatcatccacagtaagaaaacagcggctctccagtccgctactccagtagagagagtgaaacttcaggaggcactctctcagctagattttcagtgggagaaggtgaataagatgtacaaggaccgccagggcagattcgaccgcagcgtcgaaaagtggcggcgattccactatgacataaagatcttcaatcagtggttgactgaagcagagcaatttctgagaaagacgcagatcccagaaaactgggagcacgctaagtacaagtggtatcttaaggaattacaggacggcatcggccagcgacagactgtcgtgcgaacattgaacgctaccggtgaagagattatacagcagtcaagcaagaccgacgcgtccattctgcaggagaagctgggcagccttaacttgaggtggcaggaggtctgcaagcaactgagcgataggaaaaagcgcctggaagagaccctggaaagactacaggagcttcaggaggccacagacgaattagacctcaagctgcggcaggcagaagttattaagggatcctggcagcctgttggagacctactgatcgattctttgcaggaccatctagagaaggtcaaagcgctgcggggtgagatagcacctctgaaggagaatgtgtctcatgttaatgatctggccagacagctcacaaccctgggaatacaactgtccccttacaacctcagtactttggaggatttgaatacccgatggaaactgttacaggtagccgtggaggaccgggtaagacagctgcacgaggcacatagggactttgggcctgcctcccagcacttcctgtcgaccagcgtccagggaccctgggagcgggctatcagcccaaacaaggttccttactatatcaaccacgagacccaaaccacatgttgggatcatccaaagatgacagagctgtaccaaagcttggcggatctaaacaacgtccgattcagcgcctatcgcaccgccatgaaattacgtcgcctgcagaaggccctgtgcctcgacctgctatccctttccgccgcttgcgatgccctcgaccagcacaatttaaagcaaaacgaccagccaatggacattctccagatcattaattgcttaaccacaatctacgaccgcctggagcaagagcataataacttggtgaacgtccctctttgtgtggacatgtgtctgaattggttacttaatgtgtacgacaccggtaggaccgggaggatcagggtgctgtcttttaaaaccggaatcatttcactgtgcaaggcccacctggaggacaagtatcgatacttgtttaagcaggtagcatccagtactgggttttgtgaccaaaggagattgggcctgctgctacacgatagcatccagattccgaggcagctaggagaagttgcttcatttggcgggagtaatatcgagccctccgtgcggagctgcttccaattcgctaacaacaagccggagattgaggctgcgctcttcttagactggatgaggctggaacctcagtcgatggtgtggctccccgtgctgcaccgcgttgccgcagccgagactgccaagcaccaggccaagtgtaatatctgcaaggaatgcccgatcattggctttcgctatcggagcctaaaacatttcaattatgatatttgtcagtcatgttttttctcaggtcgtgtggcgaaggggcacaagatgcattaccccatggtcgagtattgcactcccactacctccggggaagatgtgcgggatttcgcgaaagttctcaaaaacaagtttaggaccaagcgatactttgctaagcatcccaggatgggctatctgccggtgcagactgtgctggaaggggacaacatggagactgataccatg

SEQ ID NO: 251347 - DNA, 3432 bp, synthetic construct
  misc_feature 1..3432: note = Description of Artificial Sequence: Synthetic coding sequence
  source 1..3432: mol_type = other DNA
atgctgtggtgggaagaggtcgaagactgttacgagcgcgaggacgtacagaagaagactttcactaagtgggtgaacgcccagtttagcaaattcgggaagcagcatattgagaacctgttcagtgatctgcaggacggacggcgcctgctagatctgctggaggggttgacagggcagaaactgccaaaggaaaaagggtccacacgagtgcatgccctcaacaacgtcaataaagcgcttcgggtgcttcagaataataatgtagacctcgttaatataggctcgaccgatatagtggacgggaatcacaaactgacactgggcttgatctggaacattatcctccactggcaggtgaagaacgtgatgaagaatatcatggcagggcttcagcagacgaactcagagaagattctcctttcctgggtcagacagagcacacgaaattatccacaggtgaatgttatcaatttcactacgagctggagcgatggactggctttaaatgcactgatacacagtcaccgaccagacctgtttgattggaactccgtggtgtgtcaacagtctgccacccagagactagagcacgccttcaatatagcccgatatcaacttggaattgagaaactcctcgatcctgaagacgttgacacaacttacccggacaagaagagtatactgatgtatatcaccagtctgttccaggttctgccacagcaagtcagcattgaggctatccaggaagtcgaaatgctgccacgccctccgaaagttaccaaagaggaacactttcaactccatcaccaaatgcactatagccagcagatcaccgtctctctcgcgcaagggtatgaaagaacctcctcccctaagcctaggtttaagtcctatgcttatacacaggctgcatacgtcactacttctgacccaacccgctcaccctttccctcccagcacttggaggcacccgaggacaagagctttggatcctccctgatggagtcagaagtcaatctggatcgttatcagacagccctagaagaggttttgtcatggttgctctcggctgaggatacactacaagcccagggtgagatcagcaacgatgtggaagtcgtcaaagaccagttccacacccacgaggggtatatgatggacctgactgctcaccagggtagagtggggaatattctgcagttagggtctaagctaataggcactggcaagctgtccgaagacgaggagaccgaggtgcaagaacagatgaatttattgaactcccggtgggagtgcctgcgggtggcatcgatggagaaacaatctaacctgcatcgtgaaatttcctatgtaccctcaacttatctcactgagattacccacgttagtcaagctctactcgaggtagagcagctgctgaacgctcccgacctgtgcgccaaggactttgaggaccttttcaagcaggaagaaagcctgaaaaacattaaggacagcctacagcagagcagcggcaggatagacattattcactccaaaaaaaccgcggcactgcagtccgcaacgcctgttgagcgagttaaattgcaagaggcactctcacagctcgatttccaatgggagaaggtcaataagatgtataaagataggcagggacggtttgataggagcgtggaaaaatggcggaggtttcattatgacatcaagattttcaaccagtggctaacagaagctgagcagtttctcaggaagactcaaattccggaaaactgggagcatgccaagtacaagtggtacctcaaggagctccaagacggtattggccagcggcaaacagtggtacggaccctgaacgcaactggcgaagaaatcattcagcaatcctctaaaaccgacgctagcatcctgcaggagaagctggggagcctgaatttgagatggcaggaggtttgcaaacagcttagtgaccggaagaagcggctcgaggagaccctagagcgactccaagaacttcaagaggcaaccgatgagcttgacttgaagctccgtcaagcagaggtcataaaaggttcttggcagcctgtaggtgacttgctaatagatagcctgcaggatcacttggaaaaggtcaaagcactacgtggggagatcgctccattgaaagagaacgtctctcatgtgaacgatctcgcaaggcagctcactacattgggaatacaattaagcccttacaacctcagcacactggaggacctgaatactagatggaagcttctccaggtcgcagtcgaagatcgtgttcgccagctgcacgaggcacacagggactttgggcctgcttcccaacacttcctgtcaacctccgtgcaggggccctgggaacgcgcgatctcccctaataaggtaccttactatattaaccacgaaacccagactacatgctgggaccaccccaaaatgaccgaactgtaccagtccctggctgacctgaataacgtgcgattcagtgcttaccgcaccgctatgaaattgcgcaggctccagaaggcactgtgtctggaccttctctccctgtccgccgcttgcgacgcactcgatcagcacaatctgaagcaaaatgaccagcccatggacatattacagatcattaattgtctcaccactatctatgacagattggagcaggaacataacaaccttgtgaatgttcctctttgcgttgatatgtgtctgaattggttgctgaatgtgtacgataccgggaggacagggcgcatacgggtgttatcatttaagaccggtatcatcagcttatgcaaggcccacctggaagataagtatcgttacctttttaagcaggtcgcctcctctaccggattctgcgatcagaggcggctgggtctgctgttgcacgatagtattcagattccacgccaattaggagaagtcgccagcttcggcgggtcgaacatcgagccatcggtgcggtcatgtttccagttcgcaaacaacaagccagaaatcgaggccgctctgttcttggattggatgcgattagagccacagagtatggtttggctcccagttttacatcgcgtggctgctgcagagactgcaaaacatcaagccaagtgtaacatttgcaaggagtgtcccataataggcttccgataccgcagtctcaaacacttcaactacgacatctgtcaatcctgttttttctcaggtcgcgtggctaaggggcacaagatgcactaccctatggtcgagtattgcacacctaccacttcaggggaggacgtcagggattttgctaaagtgcttaagaacaaatttaggacaaaacgttattttgccaagcatccgaggatggggtacctcccagttcaaactgtgctagagggtgacaacatggagacggacactatg

SEQ ID NO: 251348 - DNA, 3432 bp, synthetic construct
  misc_feature 1..3432: note = Description of Artificial Sequence: Synthetic coding sequence
  source 1..3432: mol_type = other DNA
atgctttggtgggaagaagtggaggattgctatgagcgtgaggatgtccaaaagaaaacattcaccaaatgggtcaatgctcaattctctaaatttggaaagcagcacatcgagaaccttttctctgatctccaggatggcaggagattactggacctcctggaggggctgacgggccagaaactgccgaaggagaagggaagcacgcgagtgcatgcacttaacaacgtcaacaaggcacttcgtgtattgcagaacaacaacgtggatcttgtgaatattggctctactgatatcgtggatggaaatcataagttgaccctgggcctgatttggaacattatactacattggcaggtgaagaatgtgatgaagaacatcatggcggggctccaacagaccaactcagagaaaattctgctgagctgggtgaggcagtccactcggaactatccccaggtgaacgtgatcaactttaccacaagctggtcagatggactggcactcaatgccctcattcattcccacagaccggacctcttcgattggaactccgtcgtgtgccagcagtctgcaactcaacgcctggagcatgcctttaacatcgcgcggtatcagctgggaatcgaaaagctgctagacccagaggacgtggatacaacatatcctgataagaagtccatcttaatgtacatcacaagccttttccaagtactcccacaacaggtatcaatcgaagccattcaggaagtggagatgctccctcgcccacccaaggtgacaaaggaagaacactttcagctacatcatcagatgcattattcccagcaaataactgtgtcactggctcaaggatatgagcgaacatcaagtcccaaaccacgttttaagtcctacgcatatactcaggctgcgtacgtgacaacgtctgatccaactagatcgccgttccccagtcaacacttggaggcacccgaagacaagagcttcggatcctccttaatggagtcagaggtgaatctggaccgataccaaacagcactggaagaggtgctatcctggctactgtccgccgaagatacattgcaggcacagggggaaatttccaacgacgttgaagtcgtgaaagatcagtttcacacacacgagggctacatgatggaccttacagcgcatcaaggacgagtcgggaacatcctgcaactgggctctaagctgatcggaactggaaagttatcagaggatgaggaaaccgaagtacaggagcagatgaatctgctgaactctaggtgggagtgtctgcgagttgcatcaatggagaagcagtctaatctgcacagagagattagttacgtcccctccacttacttgaccgaaatcactcatgtttcccaggctctgttggaagtggagcagcttctaaatgcaccagatctgtgtgctaaggacttcgaggatcttttcaaacaagaagagtccctgaagaatataaaggactctcttcagcagtcttcagggagaatcgatatcatccactctaagaagacagctgccttacagtctgctactcctgtggagagggtgaagcttcaagaggccctttcccagcttgatttccaatgggagaaagtgaacaagatgtacaaagataggcagggccggttcgaccgcagcgtggaaaaatggagacggttccattacgatattaagattttcaatcaatggctcactgaggccgagcagtttctccgcaagacacaaataccagaaaattgggagcatgctaagtataaatggtatctaaaagagctgcaggatggcatagggcagcgacaaactgtggtgcggacactgaacgctaccggcgaagagattattcagcagtccagtaagactgacgcgagcattctgcaggaaaaattaggttcattgaatctacggtggcaggaggtttgtaagcaactgagcgataggaaaaaacgcctcgaagaaactctggaacggttacaggagctccaggaagccacagacgagttggatctcaagcttcgtcaggctgaggtcattaagggcagctggcagcccgttggcgatctgctgatcgattccctgcaggaccacctagaaaaagtgaaggcactgagaggagaaatcgctcccctgaaggagaacgttagtcatgtgaacgacctcgctcggcagctgaccactttagggatccagctatccccatataatctgtctacactggaagatctgaacactcgatggaagctgctgcaggtcgcggttgaggaccgggtaaggcagttgcatgaggcacacagggacttcggccctgctagtcagcacttcttaagcacaagcgtccaaggcccatgggagagagccattagtccaaataaggtcccctattatatcaaccacgaaacccaaacgacttgttgggaccacccaaaaatgaccgagctgtaccagtcacttgctgaccttaacaatgtgcggttcagcgcatatcgaacagccatgaaattgcggagattgcaaaaggcgctctgcctggaccttttaagcctaagtgcagcttgtgacgcactggatcagcacaatctgaagcagaatgaccagcccatggacatattgcagatcattaactgcctcactacaatttacgatcgcttggagcaagaacacaacaacctggtgaacgtgcccctctgcgtggacatgtgtctgaattggctactgaacgtgtatgatactggtagaacgggaaggattcgtgtcctctcattcaagactggtattatctccctgtgcaaagcccacctggaggataagtacaggtacctttttaaacaggttgcgtcttcaacgggattttgcgatcaaaggaggttggggctacttttgcatgatagtatccaaattccgcggcagctaggagaagtcgcctcattcggcggaagtaacattgagccttctgtccgcagctgcttccagtttgcaaacaacaaacctgagattgaggctgccctgttcttagattggatgcgcttagagccacaaagcatggtctggttgcccgttctgcatagagtggctgccgctgagactgcgaaacatcaggctaaatgcaacatttgcaaagagtgtcccattattggttttcgctatagatccctgaagcacttcaactacgatatctgtcaatcgtgttttttctctggacgggtggctaaagggcataagatgcactaccccatggttgagtattgcacaccgacaacatccggagaagatgtcagggattttgccaaagttctcaagaacaaatttcggacgaaacgctactttgccaaacatcccagaatgggttacctgccggtgcagaccgtactggagggcgataacatggaaaccgacacaatg

SEQ ID NO: 251349 - DNA, 3432 bp, synthetic construct
  misc_feature 1..3432: note = Description of Artificial Sequence: Synthetic coding sequence
  source 1..3432: mol_type = other DNA
atgttgtggtgggaggaggtcgaagactgctacgagagggaggatgtacaaaaaaaaacatttactaagtgggttaacgcacagttctctaagttcggaaagcagcatatcgagaatctgttttcagatctgcaggatggcagaaggcttttggatctcctggaggggcttacggggcaaaagcttccaaaggagaaggggtcaacgcgggtccacgccttgaacaacgtgaacaaagcgctgcgggttctacaaaataataatgtcgatctcgtcaacatcggtagcactgacatcgtagatggcaaccacaagttgacactgggtctgatttggaacattatcctgcactggcaggtcaagaacgtaatgaagaatatcatggccggcttgcagcagacaaatagtgaaaagatcctgttgagctgggttcggcagagtacgcgtaattatccacaagtcaacgttattaactttactacaagctggtccgacgggttagccctcaatgccctcatccattcacaccgacctgacctctttgattggaactctgttgtctgtcagcaatctgcaactcagaggctggaacacgcattcaacatcgcccggtaccagctcggcatcgagaaactgctggacccagaggatgtcgataccacttatcccgacaagaagtctatattaatgtacatcacgtccctgtttcaggttctgcctcagcaagtgagcattgaagccatacaggaggtggaaatgttgccaaggcctcccaaagttacgaaggaagagcatttccagttgcaccaccagatgcattactcccaacagatcaccgtctctctggcgcagggatatgaaagaacttcatctccgaaacctagatttaaaagctatgcctacacacaggcagcctatgtcacaactagcgaccccaccagaagtcctttcccttcccaacacttggaggctcccgaagataaatccttcggctcttccttgatggagtccgaagtgaacctcgaccgctaccagacggcactggaggaagtcctgtcctggctgctcagcgcggaggacactctgcaagcccagggcgagatcagcaacgatgtggaggttgtcaaggatcagttccacacccatgaggggtacatgatggatctgacagctcaccagggaagggtgggaaatatcctgcagcttggatcaaagcttattggcactggcaagctatccgaggatgaagagaccgaggtacaggaacaaatgaacctgctcaatagcaggtgggaatgtctgagagtggcttcaatggaaaaacagagtaacttacatagagagatctcttacgtgccgtcgacatatctgactgagattacccacgtctctcaggccctgctggaagttgagcagctattgaacgcccccgacttgtgtgccaaggattttgaggatctgttcaaacaggaagagtctctcaagaacatcaaggactccctccaacaatcttccggccgaatcgatatcatccactctaaaaagaccgccgccctgcaaagcgccacccctgtggagagagtcaagctgcaggaagccttgagtcagctcgatttccaatgggaaaaggtgaacaagatgtacaaagaccgacaagggcggttcgacagatccgtggagaaatggaggcgcttccactacgacatcaaaatcttcaatcagtggcttactgaagccgaacagtttctacgcaagacacaaattcctgaaaattgggaacatgccaagtacaaatggtacctgaaggaactccaagatggcattgggcagaggcaaacggtggtgagaaccctcaacgcaactggcgaggagatcattcagcaatcctctaagacggacgcttccatcctgcaggaaaagttggggtccttaaaccttcgttggcaggaggtttgtaagcagctcagcgaccgaaaaaagcggctcgaggagaccctggagaggctgcaggaactccaagaggcaaccgatgagctggacctcaagctgcggcaggctgaggtcattaaagggtcgtggcagcccgtaggggacttacttatcgactctctgcaggaccacctggaaaaggtgaaggctttgcggggagagattgcccccctgaaggagaacgttagccatgtgaacgacctggcaagacaactgacaactctcgggatacagttatcgccttacaatttatccactctcgaggacctgaacacccggtggaagctgctgcaggtggcggtggaagaccgtgtaaggcagctgcatgaggctcaccgggattttgggcccgcttcccagcacttcctgagtacaagcgtgcaggggccctgggagcgagctatttcacctaataaggtgccctactatatcaaccacgagacccagaccacctgctgggatcaccccaagatgactgaattgtaccagtcccttgctgatcttaacaacgtgcgcttctctgcctaccggacagccatgaagttacggagactgcagaaagcactgtgcctggatctgctttctctgagcgcagcgtgcgatgcactggatcagcataatctcaaacagaacgaccagccgatggatattcttcagatcattaattgccttaccaccatctacgacaggctggaacaggagcataataatttggtgaatgtgccactgtgcgtcgacatgtgcctgaactggctccttaatgtctacgacacaggccgcacagggcggattcgggtcctgtcatttaagaccggcattatttctctctgcaaggcccacttggaggacaagtatcgttatctgttcaagcaggtggcaagctctaccggattttgcgaccagcgccggctggggctcctgttacacgactctatacaaattccacgacagctgggagaggttgccagcttcgggggaagcaacatcgaaccatccgtgcgttcttgttttcagttcgccaacaacaagcccgaaatcgaggccgccttgttccttgactggatgcgcctcgagccacagtccatggtgtggctgccggtgctgcatcgagtagctgccgcggaaaccgccaagcaccaggcgaaatgcaatatatgcaaggaatgcccaattattggattcaggtatcgctcccttaaacattttaactacgatatatgccagtcttgcttcttttcagggcgagtcgcaaaagggcataagatgcactatccaatggtggaatactgtacacccaccacaagtggggaggatgtccgggacttcgccaaagtgttaaagaataaatttcgaaccaagaggtactttgctaagcacccaaggatgggttacttgccagtacagaccgtccttgagggcgacaacatggagaccgacactatg

SEQ ID NO: 251350 - DNA, 3432 bp, synthetic construct
  misc_feature 1..3432: note = Description of Artificial Sequence: Synthetic coding sequence
  source 1..3432: mol_type = other DNA
atgctgtggtgggaggaggtggaagattgctatgaacgagaagatgtccagaaaaagaccttcaccaaatgggttaatgcccagttctctaaatttggcaaacagcatatcgaaaacctgtttagtgacttgcaggatggccggcggctcctggatctgctcgaaggattaaccgggcagaaactgcccaaggaaaagggcagtacccgagtccatgccctgaacaacgtgaacaaggcactgcgggtgctgcagaacaataacgtagacctggttaatataggtagcaccgatattgtggacggaaatcacaagctaaccttggggctcatttggaatattatactgcattggcaggtcaagaacgtgatgaaaaatattatggccggactgcaacagaccaactccgaaaagatactgctgagttgggttaggcagtccactagaaattaccctcaggtgaatgttattaacttcactacaagttggtctgatgggcttgccctgaacgccctcatacacagccatagacctgatctgttcgattggaacagcgtggtgtgccagcagtccgcaactcagagactagagcacgcttttaacatagcaaggtatcagctgggtatcgagaaattgctggatcccgaggacgtggacactacataccccgataagaaaagcattctgatgtatattacctctctgttccaagtgctccctcagcaagtcagcattgaggctatacaggaggtggagatgcttccccgtcctcctaaggttaccaaagaagaacattttcagctgcaccaccagatgcattatagccagcagattactgttagtctggcccagggatacgagcggacctcctcaccaaaacctcgctttaaatcttacgcatatacccaggctgcctatgtgaccactagcgatcccactagatcccctttccctagccagcacctggaagctcctgaagacaagagttttggttccagtttaatggagtcagaggtgaacctagataggtatcagaccgcactggaggaagtgctgtcctggctcttaagtgccgaagacactctgcaggcccagggagagatttctaatgacgtggaggtcgtgaaggaccaatttcatacccatgagggctatatgatggacttaaccgcccatcagggacgggtgggcaatatcctgcagctggggtctaagctgattggaaccggcaaactctccgaagatgaagagactgaggtgcaagagcaaatgaacctactcaacagtaggtgggagtgcctgagggttgcctccatggaaaaacagagcaacctgcacagagagatctcctacgttccctctacctacctgactgagattacccacgttagtcaggccctgttagaagtggagcagctcttaaacgcccctgacctctgtgcaaaagatttcgaagatctgttcaagcaggaagagagtctgaagaacataaaggattctctgcagcagtccagcgggaggatagacataattcacagcaagaagacagcagccctccagtctgcaactcctgtggagcgggtgaaactgcaggaagccctgagccagctggacttccaatgggagaaggttaataaaatgtacaaagaccgtcagggaagattcgacagaagcgtggagaagtggcgaagatttcattatgacataaagatttttaaccagtggctaaccgaggcagagcagtttctgcgaaaaacacagatcccagagaactgggagcacgcaaagtacaaatggtatctaaaagaacttcaagatggaataggccagcggcagaccgttgtgcgtactttaaatgccaccggcgaagaaatcattcaacagtctagcaaaaccgacgcctccatactacaggagaaattgggatctctgaatctacgatggcaggaggtgtgcaaacagctatccgacagaaagaaaaggctggaagagacacttgagagactgcaggagctgcaggaggccacagacgagttagatctcaaactgagacaggctgaagttataaaaggctcttggcagcccgtgggagacctgctgatagattctctgcaggatcatctggagaaagtgaaggccctgcggggcgaaattgcaccactgaaagagaacgtcagccacgtgaatgacctggctcgccagctgactaccctcggcatccaactctcaccatacaacctgtctacattagaagatctgaatactaggtggaagctgctgcaggtggcagtggaagatcgcgtaagacagctgcacgaggctcacagagattttgggccagcctctcagcactttctcagtacatctgtgcaaggcccgtgggagcgggctataagccctaacaaggtgccttattacattaatcatgagacccagacaacatgttgggaccatcctaagatgaccgaactatatcaaagtctggccgatctgaataacgttcgctttagcgcttatcgcaccgcaatgaagctgcgtcggctccagaaggctctatgtctggatctgctgagtctaagtgcagcctgcgacgctctcgaccagcacaacctgaagcagaacgaccaaccaatggacatattgcaaatcatcaattgtctgacaacaatttatgatagactggaacaggagcacaataatctggtgaacgttcctctgtgtgtagacatgtgtttgaattggctcctgaatgtctacgacactggtcggaccggcaggatcagggttctatcctttaaaactggcattatttctttatgtaaagcacacctcgaggataaatacaggtacttattcaaacaagtggcaagtagcacagggttctgtgaccaacgtcggttaggcctgctactacatgattcaattcaaattcctaggcagttgggggaagttgcttcttttggaggctcaaacattgagccaagtgtccgcagctgctttcagtttgctaacaataagcctgaaatcgaggccgctttatttctggactggatgcggctggagccccaatccatggtgtggctgcctgtcctgcatagagtggccgccgctgagaccgcaaaacaccaagccaagtgcaatatctgcaaagaatgccctataatcggctttaggtacagaagcttaaaacactttaactatgacatttgccaatcatgttttttctccgggagggtggccaaaggccacaagatgcactacccaatggtggaatactgtaccccaaccaccagtggtgaggatgtgagagacttcgcaaaggtgctgaagaacaaattcagaactaaacggtatttcgcaaagcaccctcgaatgggctatctgcctgtacaaactgttctggaaggagacaatatggagaccgacaccatg

SEQ ID NO: 251351 - DNA, 3432 bp, synthetic construct
  misc_feature 1..3432: note = Description of Artificial Sequence: Synthetic coding sequence
  source 1..3432: mol_type = other DNA
atgttgtggtgggaagaagtagaagactgttatgagcgggaagatgttcaaaagaaaacatttaccaaatgggtcaacgctcagtttagcaagttcggcaaacaacacatcgaaaacctgttttctgatttacaagatggtagacgccttcttgacttattagaaggcctgacaggacagaaacttcctaaggagaaagggtcaacaagagtccacgcgttaaataacgttaacaaggctctacgcgtactacagaataataacgttgatcttgtgaatattggcagtacggacattgttgatggtaatcataaactgaccttaggcctgatatggaatatcattttgcactggcaagtgaaaaacgtaatgaaaaacataatggcaggtttacaacaaacaaactcagaaaagatcctgctgtcatgggtccggcagagcacacgcaactatcctcaagtaaacgtaattaatttcacgacaagctggtctgatggactcgctctgaatgctctgattcactctcacagaccggatctgtttgactggaacagcgtagtgtgccaacagagtgctacgcaaagactcgagcacgcatttaatattgcgagatatcaattgggcattgaaaaacttcttgatcctgaagatgtggataccacatatccggacaaaaaaagcattcttatgtatatcacatcactttttcaagtgttaccgcagcaggtttctattgaggcgatacaggaagttgagatgttgcctagacctccgaaagtgacaaaagaagaacattttcaactgcatcaccaaatgcactactctcagcaaataacggtatcgttagctcagggttacgaaagaacttcttcgccgaaaccgagattcaagtcctatgcctatacacaggctgcgtatgttactacctcagaccctacacgtagtccgttccctagccagcacctggaagccccggaagacaaatcgtttggcagtagtctgatggaaagcgaggtcaatttggatcgctatcaaaccgcgctggaagaggtattgtcttggttattgagcgccgaagataccttgcaggctcaaggagagatatcaaatgatgtggaggtcgttaaagatcagtttcacacgcacgaaggctatatgatggacctgactgctcatcaaggacgagttgggaatattttacaacttggaagcaagttgatcggaactggaaagctgtctgaggatgaagagacggaagttcaggaacagatgaatttattgaactctagatgggaatgcctgcgcgttgcaagcatggagaagcagtctaatctccatcgcgaaattagctacgtaccatcaacttacttgactgagattacccacgtgtctcaagctttattagaagtggagcaattacttaatgctcctgacttatgtgcgaaagactttgaagatctgtttaaacaagaagagtctttgaaaaacatcaaggatagcttgcagcaatcatcgggacgtatagatataatacactctaaaaagactgctgccttacagagtgcaacccctgttgagagagtgaagctgcaggaagctctctcccaattagattttcaatgggaaaaagtgaataagatgtacaaggatcgccaaggccgattcgataggtcagtcgaaaaatggcggcggtttcactatgatattaagatctttaaccaatggctgacagaagccgaacaatttcttcggaaaactcaaattccggaaaattgggaacatgcgaagtataagtggtaccttaaggaacttcaagacggaatcggacaaaggcagacagtagtcaggacactcaacgctactggcgaagaaataatacagcagtcatcaaaaacagatgcatcaatccttcaggagaagcttggttcacttaacctgaggtggcaggaagtgtgcaagcaacttagtgatcgtaaaaagcgcttggaggaaacactcgaacgcttgcaggaattgcaggaggcaacggatgagttggatctgaaactgagacaagcagaagttatcaagggatcttggcagcctgttggtgatcttctgattgattcgctccaagaccatcttgaaaaggtcaaagcactgcgtggtgaaatagcccccctcaaagaaaacgttagtcatgtcaacgatcttgcgcgccaattgacaactttgggcattcagttgtcaccgtacaatcttagcacattggaagatctgaacactcgatggaaattactgcaagtggcggtcgaggatcgtgtcagacaactgcatgaagcacatcgtgactttgggccggcgtcacaacattttctttcaacttccgtccaaggtccgtgggaaagagccatttctccgaacaaagtaccgtactacatcaaccatgaaacccagacaacgtgctgggaccatcctaaaatgacagaactgtatcaatcacttgccgatctgaataatgttcgattttcagcctatcgtacagcaatgaaattgcgcaggctacagaaagcactgtgcctggatctattatctttgagtgcagcctgcgatgcgctagatcaacataatctgaagcagaatgatcaaccgatggatattctgcaaattattaattgcctcacgacgatctatgatcgtttagagcaagaacacaataacctcgtgaatgtcccactctgcgtcgatatgtgcctgaactggctgctgaacgtctatgatacgggcagaacgggacggattcgcgttttatcttttaaaacaggaattatttcgctttgcaaggcacatttagaggataaatatagatatctctttaagcaagtggcatcttcgactggattttgtgatcaaagacgtctgggtttgctcttgcatgactccatacagattccgcgccaactcggggaagtcgcaagctttggtggatcaaacatagaaccaagcgtccgttcctgctttcaatttgcaaataacaaacctgaaattgaagcggctttgtttctggactggatgcgtctagagcctcagagcatggtttggcttccagtattacaccgggtcgctgctgccgagaccgcaaaacaccaggctaagtgtaacatatgtaaggaatgcccgattattggtttccgttatcggagccttaaacactttaactatgatatctgtcaaagctgctttttttccggtcgcgtagcaaagggtcataaaatgcattatcccatggtcgagtactgtaccccaaccacgtctggggaggacgtccgcgattttgcaaaagtcctgaaaaataaattccgcacaaaacgctattttgcgaagcatccgagaatgggctatcttccagttcaaacagtgttagagggtgacaatatggaaacagacacgatg

SEQ ID NO: 251352 - DNA, 3432 bp, synthetic construct
  misc_feature 1..3432: note = Description of Artificial Sequence: Synthetic coding sequence
  source 1..3432: mol_type = other DNA
atgctgtggtgggaagaggtcgaggattgctacgagcgcgaggatgtccagaaaaagaccttcactaagtgggtgaatgcgcagtttagcaaatttggaaaacagcacatcgagaaccttttctcagaccttcaggacggacgtcgcctgctcgacctcctcgagggtcttacgggtcagaagctgcctaaggagaaaggatccactcgagttcacgccctgaacaatgtgaacaaggcgctgagggtcctccaaaacaacaatgtggacctggttaacataggaagcaccgacatagtcgacggcaatcacaagctgactcttggattgatctggaacattatccttcactggcaagtcaaaaacgtgatgaagaacatcatggcgggactgcaacagactaatagcgaaaagatcttgctgtcgtgggtgcgccaatcgacgagaaattacccgcaagtgaacgttatcaacttcacgacgtcctggtccgatggcctcgccctgaatgcgctgatccattcccatcggcctgatttgtttgattggaatagcgtggtgtgtcagcagtcggccacccagagactggagcatgccttcaatattgcgagatatcaactggggatcgaaaagctcctggacccggaggacgtcgataccacttacccagataagaagtcgatccttatgtacatcacgtcgctgttccaggttctgccgcagcaagtgtcgatcgaagcgatccaagaggtcgagatgctcccacggcctccaaaggtgactaaagaagaacatttccagctgcaccaccaaatgcactactcccaacagatcaccgtgtccctggctcaaggctatgaaagaacctcctcgccaaagcctcggttcaaatcatacgcctatactcaggccgcctacgtgaccacttccgaccccacccgctccccgtttccgtctcagcacctggaagctccggaggataagtcattcggctcaagcctcatggagtcggaggtgaacctggatcgctaccagaccgctctggaggaggtgctgtcgtggctgttgagcgccgaagataccctgcaagcccagggcgagatctctaatgacgtggaggtcgtgaaggaccagtttcacacccatgagggatacatgatggacttgaccgcgcatcagggacgcgtggggaacatcttgcagttgggcagcaaactcattggaacgggaaaacttagcgaggatgaagaaaccgaagtccaagaacaaatgaatctcctgaattccaggtgggaatgtctgcgcgtggctagcatggagaagcagtcgaacctgcaccgcgagatctcgtacgtgccctcgacctatcttactgagattacccatgtctcacaggctctgctggaagtggaacaactcctcaatgcgccggacttgtgcgctaaggacttcgaagatctctttaaacaggaagagtcgctcaaaaacatcaaggacagtctccagcaatcgagcgggcggatcgatatcatccactcaaaaaagacggcggctctccagtccgcaactccggtggaacgcgtcaaattgcaagaggcactgtcgcaactggacttccaatgggaaaaagtgaataagatgtacaaggacagacaggggcgcttcgatcgctccgttgaaaaatggcggcgcttccactacgacatcaagattttcaaccagtggctcaccgaggcagagcagttcctgcgtaagacccaaatccccgagaattgggagcacgcaaagtataagtggtacttgaaagaactccaagacggcatcggccagcgccagaccgtggtgaggactctgaacgcgaccggcgaagaaatcattcaacagagctctaagactgacgcgtccatccttcaggagaagctggggtcactgaacctgcggtggcaggaagtgtgcaagcaactgtcagaccggaagaaaagactggaggaaacgctggagcggcttcaagaattgcaagaagccaccgacgagcttgatctgaagctgcggcaggcagaggtgatcaagggatcatggcagccggtgggagatctgctcattgactcgctccaggatcacctcgagaaagtgaaagcgcttcgaggggagatcgcgcctttgaaggagaacgtgtcacacgtgaacgatctggcccgacagcttactactttgggaatccagctgtcaccctacaacctgtcaactctcgaagatctgaatactagatggaaacttttgcaagtggcggtcgaggaccgcgtccggcagctgcacgaagcgcacagagacttcgggccggcgtcgcagcattttctctccaccagtgtccaaggtccgtgggaacgcgccatctcgccgaataaagttccttattacatcaaccacgagactcagactacgtgctgggatcacccgaaaatgactgaactttaccaatcgcttgccgacttgaataatgtccgcttttcagcgtaccggactgcaatgaagctgcgcagactgcagaaggccctctgcctggacctgctgtcgctgtcggccgcttgtgatgcgctcgaccaacataatcttaaacagaatgatcagccaatggacatcctgcaaatcatcaactgcctgactactatttacgatagactggagcaagagcacaacaacttggtgaacgtgccactctgtgtcgacatgtgcctcaactggctgctgaacgtgtacgataccggtcgcaccggtaggatccgcgtgctcagcttcaagactgggatcatctcgctgtgcaaagcgcacctcgaggacaagtacagatatctcttcaagcaggtggcatcctcgaccggattctgtgatcaacgtagactgggactgctcctgcacgattctattcaaattccacggcagctcggagaagtggccagcttcggaggctccaacatcgagccgtcagtgcggtcgtgtttccagttcgccaacaacaagccggaaatcgaagccgcactctttctcgattggatgcggctggaaccacagtcgatggtgtggctccctgtgctgcacagagtggcggccgctgagactgctaagcatcaagccaaatgcaacatttgcaaagagtgcccgatcatcgggtttcggtaccggtcgctcaaacatttcaactacgacatctgccagtcgtgcttcttttcgggtcgcgtggccaaaggacataagatgcattacccgatggtcgaatactgcactccaactacctccggtgaagatgtgcgcgatttcgcgaaggtgctcaagaataagttccggaccaagcggtacttcgccaaacacccaagaatgggatatctgccggtgcagacggtgctggagggagacaatatggagactgataccatg

SEQ ID NO: 251353 - DNA, 3432 bp, synthetic construct
  misc_feature 1..3432: note = Description of Artificial Sequence: Synthetic coding sequence
  source 1..3432: mol_type = other DNA
atgctctggtgggaagaagtggaagattgttacgagcgcgaagatgtgcagaagaaaacgttcaccaagtgggtgaatgctcagttctctaagttcggtaagcaacacatagagaacctgttctcagacctgcaagatgggcgccggctgctggacctcctggagggattgacgggacagaaactgccgaaggaaaaggggagcaccagagtccacgcgctgaataacgtcaataaagcgttgcgggtgctccaaaacaacaacgtggacctggtgaatattggatcgactgacatcgtggacggaaaccataagctcaccctgggattgatttggaacattatcctgcactggcaggtgaagaatgtgatgaagaacattatggctggactccagcagaccaattcagagaaaatcctcctctcatgggtccgccagagcaccagaaattacccccaggtcaatgtcatcaactttaccacgtcgtggtcggacggactcgcattgaatgcgctcatccactcacatcggcccgatttgtttgactggaactcagtcgtctgtcagcagtcggcgacccagaggcttgaacacgcgttcaacatcgctagataccagctgggaatcgagaagctgctggatccggaggacgtcgacacgacctacccggacaagaaaagtatcctgatgtacattaccagcctcttccaggtgctgcctcagcaagtgtcaatcgaagcgatccaggaggtcgaaatgttgccgcgccctccaaaggtgactaaggaggagcatttccagctgcaccaccaaatgcactattcgcagcaaatcactgtgtcgctggcccagggctacgaacgcacctcctccccgaagccgaggtttaagtcctacgcctacacccaggccgcatacgtgaccacttcggacccgaccagatcgccgttcccaagccaacacttggaggcgccggaagataagtcgttcggtagctccctgatggagagcgaagtcaacctcgaccgctaccaaacggcacttgaggaggttctgtcgtggctgctttcggctgaggacaccctccaagcgcagggagagatcagcaacgacgtggaagtggtgaaagaccaattccacacccacgagggctacatgatggatctgactgcccaccaaggccgcgtgggcaacatcctgcagcttggatcaaagctgatcggcaccgggaagttgagcgaagatgaggagactgaagtccaggagcagatgaacttgctcaattccagatgggagtgcctccgcgtggcttcaatggagaagcagagcaacctgcatcgggaaatctcatacgtgccgtccacctacctcactgagattactcatgtgagccaggcgttgctcgaagtggaacagctgctgaacgccccggacctgtgtgcaaaagattttgaggacctgttcaagcaagaggaaagcctcaagaacatcaaagattcgctccaacagagttcgggtcgcatcgacatcatccattcgaaaaagacggcagcgctgcagtccgctactccggtggagagagtaaagctccaagaagcgctgtcgcagctggactttcagtgggaaaaggtgaacaagatgtacaaagatagacagggaagattcgatagaagcgtggaaaagtggaggaggttccattacgacatcaagattttcaaccaatggctgactgaggccgaacagtttctcagaaagactcagattcccgaaaattgggagcatgccaaatacaagtggtatctcaaggaattgcaagatggaatcggacaacggcagacggtcgtccggaccttgaacgccactggagaggaaatcatccagcaaagctcaaaaactgatgcctcgatcctccaggaaaaactcggcagcctcaacctccgctggcaggaagtgtgcaagcagctgtccgatcgcaaaaagagactggaagagacgctggaacggctgcaagagctgcaagaggctactgacgagctggatctgaagttgcggcaggcagaggtgatcaagggatcctggcaaccggtcggtgatctgctcatcgactccctccaagatcatctcgagaaggtcaaagccctgcggggggaaatcgcgccgctcaaggagaacgtgtcgcacgtcaacgacctggctcgccaacttaccactttgggtattcagctctcgccgtacaatctgtcgactctcgaggacctgaacaccaggtggaagttgctgcaggtcgccgtggaggaccgggttcgccagctgcatgaagctcatcgcgacttcggaccagcatcacaacatttcctttcaaccagcgtccaggggccgtgggagcgggcgatctcgccaaacaaggtgccctactacatcaatcacgagactcaaaccacgtgctgggaccacccgaagatgactgagctgtatcagtccctggccgacctgaacaacgtccggttctccgcatatcggactgccatgaagctgcggcggctgcaaaaggcgctgtgccttgatctgctgtcattgagcgccgcgtgtgatgcactcgaccagcataacctgaaacaaaacgatcagcctatggacatcctgcagatcatcaactgccttaccaccatctacgaccggctggagcaggaacacaacaatcttgtgaacgtccctctgtgcgttgatatgtgtctgaattggctgctcaatgtgtacgacaccgggagaactggccgcatccgggtgctctcgtttaagaccggaatcatctcactgtgcaaggcgcacctggaggacaagtatcggtacctgtttaagcaagtcgccagctcaaccggattctgcgaccagagacggttgggcctgctgctccacgatagcatccaaatcccacgtcaattgggagaagtggcgtcgttcggcggatccaacatagagccgtctgtaagaagctgcttccagttcgccaacaacaaaccggagatcgaagcggcgctgttcttggactggatgcgcctggagccgcagagcatggtctggctgccggtgctgcaccgcgtggcggccgcggaaacggccaaacaccaggccaagtgcaatatctgcaaagaatgcccaatcattggcttcaggtaccgaagtttgaagcatttcaattacgacatctgtcagtcgtgctttttctcaggacgcgtggcaaaaggacacaagatgcactacccgatggtggagtactgcaccccaaccacctcgggagaggacgtgcgagatttcgccaaggtcttgaaaaacaagtttcggactaagcggtacttcgcgaaacaccctcggatgggatacctccctgtgcaaaccgtcctggaaggagacaacatggaaaccgataccatg

SEQ ID NO: 251354 - DNA, 3432 bp, synthetic construct
  misc_feature 1..3432: note = Description of Artificial Sequence: Synthetic coding sequence
  source 1..3432: mol_type = other DNA
atgctgtggtgggaagaggtggaggattgctacgagagagaggacgtccaaaagaagaccttcacaaagtgggtgaacgcgcagttctccaagtttggcaaacagcacatcgagaacttgtttagcgacctgcaagacggccgtaggctgctcgatctgttggagggcctgacaggccagaaacttcccaaggaaaagggctccacacgggtgcacgcgttgaacaatgttaacaaagctctcagagttcttcagaacaataatgttgatctcgttaatatcggttctacagacattgtagacggtaaccacaaactgaccttgggacttatttggaacattattctccactggcaggtgaagaacgtgatgaagaatatcatggctggcctgcagcagacaaattccgaaaaaatcttactgtcatgggtcaggcagtccaccagaaactaccctcaggtgaatgtaattaacttcactacctcgtggagcgacgggcttgcgctgaatgccctgattcactctcacaggcccgacctctttgactggaattcggtggtttgtcagcagagcgcaactcaacgactggaacacgcttttaacattgctagataccagctaggcatagagaagttgctcgaccctgaggacgtggacaccacatatcccgacaagaaaagtatattgatgtatattactagcctgtttcaggtactgccccagcaggtctccatcgaggcgatccaagaggttgaaatgctgcctagaccccccaaggtcacaaaggaggaacatttccagctccatcaccagatgcactacagccagcaaatcaccgtgagcttggctcaggggtacgagcggacctctagcccgaagcccagatttaaatcctacgcttatacccaggcagcttacgtgacaacttctgaccccacgcgcagtcctttcccatcccaacatcttgaggcaccggaagataagtcctttggcagttctctgatggagtctgaagttaatctcgatagatatcaaacagcactggaggaagtgctgtcgtggcttttatccgccgaagatacactgcaagcccagggagagattagtaatgatgtggaagttgtgaaggaccagtttcacacacatgagggatacatgatggacctcaccgctcatcaggggcgagtcgggaatattttacagctggggtccaagctgatcggtaccgggaagttatctgaggacgaagagaccgaagtccaagagcagatgaatttactgaactcaaggtgggagtgtctaagggtagcctccatggaaaagcaatcaaacctacacagagagatctcttacgtgccgagtacttatctgaccgaaataactcacgtttcacaggccctgctggaggtcgagcagctgctgaatgctcccgacctgtgcgccaaggacttcgaggacctgttcaagcaggaagagtccctgaagaatattaaggatagcctccagcagtccagcggccgcattgatatcattcacagcaaaaaaaccgctgcccttcaatcagctactcccgtggagcgagttaagctccaggaggcactaagtcagctggacttccaatgggagaaggtgaacaagatgtataaagacagacagggcagattcgataggtctgtcgagaagtggaggaggtttcactatgacatcaaaatcttcaaccagtggttgaccgaggctgagcagtttctgcggaaaacccagattccagagaactgggaacatgctaagtataaatggtaccttaaggagcttcaagatggcattggtcaacggcaaaccgtggtgcgtaccttgaacgctaccggtgaagaaatcatccaacaatcctccaaaaccgacgcaagtattcttcaggaaaagttaggcagcctgaacctgcgttggcaggaggtctgcaagcaactatcagaccgaaaaaaaaggctggaagagactctcgagagactacaggaactgcaggaggccactgacgagctggacctgaagctaagacaggcagaagtaataaagggttcttggcagcctgttggcgaccttctcatcgactctcttcaggatcatctcgagaaggtgaaggctcttcgaggcgagatcgcccccttgaaggagaacgtcagccacgtgaacgacctggctaggcagctgaccactctaggaatacagctttctccctataatcttagcacactggaggacctgaacacaagatggaagctgctgcaggtagcggtcgaggaccgtgtgcgacagctgcacgaagcccatagagatttcgggccagcatctcagcacttccttagcacctcagttcaggggccatgggaaagagctattagccccaataaggtcccttattatatcaatcacgaaacacagacaacttgttgggaccatcctaagatgacggagctgtatcagtctctggccgatttgaacaacgttagattcagtgcttataggactgcaatgaaactgagaagactgcagaaagcactatgtctggacttgctgtcgctgtccgcagcctgtgacgcgctcgaccagcataatctcaaacaaaacgatcaaccaatggatattttacagattatcaattgcttaactaccatctacgatcggcttgagcaggaacacaacaacttggtgaatgttcctctatgcgttgacatgtgtctcaactggctgctgaatgtatacgacaccggccggacaggtcggatacgagtccttagttttaaaacaggtattattagcctgtgcaaggcccatcttgaggataaataccgctatctatttaaacaggtcgcctccagtaccggcttctgcgatcagcggcggctcggtctgttgctgcacgacagcattcagataccccggcaactgggggaagtagcgtctttcggcggtagtaacatcgaacccagcgtgcggtcatgcttccaattcgccaacaacaaacccgagatcgaagctgcgctgttcctggattggatgcgcctcgagcctcagagtatggtgtggctccctgtgctacatagggtcgctgctgccgagaccgcaaagcaccaggcaaagtgcaatatctgtaaagagtgtccaattattgggttcagatacagaagcctcaagcacttcaactacgacatatgccaatcatgcttcttcagcggtagagtcgcaaaagggcataagatgcattacccgatggttgagtattgcaccccaacaacttccggcgaggatgttcgagattttgccaaagtgcttaagaataaatttaggactaagagatactttgccaagcacccccggatgggctatttgccggtgcaaacggtccttgaaggtgacaacatggagacggacacgatg

SEQ ID NO: 251355 - DNA, 3432 bp, synthetic construct
  misc_feature 1..3432: note = Description of Artificial Sequence: Synthetic coding sequence
  source 1..3432: mol_type = other DNA
atgctgtggtgggaagaagtcgaagattgctacgaaagggaggatgtgcagaaaaagaccttcactaagtgggtcaatgcacagttcagcaagttcggaaaacagcacatcgaaaatctcttttcggaccttcaggacggccgccggctgctggatcttctggaaggcctgactggacaaaagctcccaaaagagaagggttccactcgtgtccatgccttgaacaacgtgaacaaggcactgcgggtgcttcagaacaacaacgtggacctggtgaacatcgggtcaaccgacatcgttgacggtaaccataaactgaccctgggactgatctggaatatcatactgcactggcaagtcaagaatgtgatgaagaatatcatggcgggcttgcagcagacgaattcggagaaaatcctcctttcatgggtgagacagtcaacccggaactacccgcaagtcaacgtgatcaacttcacgacttcgtggtccgacggactggcattgaacgccctgatccactcacataggccggacctctttgattggaactcggtcgtctgtcagcagtccgccactcagcgcctggagcatgcgttcaacattgcgcgctatcagctgggaatcgagaaactccttgacccggaagatgtggacactacttaccctgataagaagtcaatccttatgtatatcacttctctcttccaagtcctccctcaacaggtgtccatcgaagccatccaggaggtggaaatgctgccacgaccgccaaaggttaccaaggaagagcacttccaactgcaccatcaaatgcattactcgcaacaaatcacggtgagcctggcgcagggctacgagcggacttcgtcgcctaaaccaagattcaagtcatacgcatacacccaagctgcgtacgtgaccacttcggacccgactagaagcccattcccttcgcaacacctcgaggcgccggaggacaagtcctttggttcgtcactcatggaatccgaagtgaacctggaccggtaccagaccgcgctggaagaggtgctgtcctggcttctcagcgcggaggacactctgcaagcacagggtgagatctcgaatgacgtcgaggtggtgaaggaccaattccacacccatgagggctacatgatggacctcaccgcgcatcagggacgcgtggggaacattctgcagctgggctccaagctgatcggcaccggaaagctctcagaggacgaggagactgaagtgcaagagcagatgaatctccttaactcgagatgggaatgcctgcgcgtcgcgtccatggaaaagcaaagcaacctgcatcgcgaaatcagctacgtcccgtcgacctacctgactgaaatcacccatgtctcccaagccctgctggaggtggaacaactgctcaacgcaccggacctgtgcgcaaaggatttcgaggatctcttcaaacaggaagagtccctgaagaacatcaaggactcactgcaacagagcagcggaaggatcgatatcatccacagcaagaaaacggccgccctccaatcggccactcctgtggaaagagtcaaactccaggaagccctttcgcaactggacttccaatgggagaaggtcaataagatgtacaaagaccggcagggaagattcgataggtcagtggaaaagtggcggcgcttccactacgatatcaagatctttaatcagtggctgaccgaagccgaacagttcctgagaaagacccagattccggaaaactgggagcatgcgaaatacaagtggtacctcaaagagctgcaggatgggatcggccaaaggcaaactgtcgtaaggaccctgaacgccacgggcgaagaaatcattcagcaatcttcaaaaaccgatgcatctatattgcaagagaagttgggatcccttaacctgcggtggcaggaggtctgcaagcagctgtcagacagaaagaaacggctggaggaaacgctcgaacgccttcaggagctgcaagaagccaccgatgagctggatctgaaactgaggcaagcagaggttatcaaggggtcgtggcaaccagtgggggacctcctgatcgacagcctccaggaccacctggaaaaggtcaaagcactgcgcggagagatcgcccctctcaaggagaacgtctcacatgtcaacgaccttgcccgccagctgactacgctgggaattcagctgagcccgtacaatctttcgactttggaggacctcaacaccaggtggaagttgctccaggtggcggtcgaggaccgcgtgcgccaactgcacgaagctcacagagactttggaccagcttcgcagcacttcctgtcgacgtcagttcaagggccctgggaacgggctatctcgcccaacaaggtcccgtactacattaatcacgagactcaaaccacctgttgggaccaccccaaaatgaccgaactgtaccaatccctcgcggacctgaacaacgtgcgcttctccgcttaccggactgctatgaagctgagaaggctgcagaaggccctctgcctggatctcttgagcctgtcagcagcatgcgatgcgctggaccaacataacctcaagcagaacgaccagcctatggacatcctccaaatcatcaactgtctcaccaccatctacgaccgtctggaacaggaacataacaacctggtcaatgtccccctctgcgtggacatgtgcctgaactggctgctgaatgtgtacgacaccggacgcacgggaagaatcagagtgctctcatttaagactggaatcatttcgctgtgcaaggcacacctggaggataagtatcgctatttgtttaagcaggtggcatcctccaccggcttctgcgaccagcgtagactgggcctgctgctgcatgacagcatccaaattccgcgacagctgggcgaggtcgcctcgttcggaggatccaatattgagccttcggtccggagctgctttcagttcgccaataacaagccggaaatcgaggctgctctgttcctcgactggatgcggcttgaaccgcagtcgatggtgtggcttccggtcctgcatcgtgtggccgctgccgaaactgcgaaacaccaagcgaaatgcaacatctgcaaagagtgccctatcatcggcttcagataccggtcactgaaacacttcaactatgatatctgtcaatcgtgcttctttagcggacgcgtcgcgaaagggcataagatgcattaccctatggtggaatattgcaccccgacgactagcggagaggacgttcgagacttcgccaaggtgttgaagaataagtttaggaccaagcggtacttcgcaaagcatccgagaatgggctacttgccggtccagaccgtgctggagggcgacaacatggaaaccgacactatg

SEQ ID NO: 251356 - DNA, 3432 bp, synthetic construct
  misc_feature 1..3432: note = Description of Artificial Sequence: Synthetic coding sequence
  source 1..3432: mol_type = other DNA
atgctgtggtgggaagaagtggaagattgctacgaacgggaggacgtgcagaagaaaactttcactaagtgggtgaacgcacagttcagcaaattcggcaaacaacatattgaaaacctgttttcggatctccaagatggccgtcgcctcctggatcttcttgaaggactcaccggacaaaagttgcccaaagagaagggatcgacccgggtgcacgcgctgaacaatgtcaataaggcgctgcgcgtcctgcagaacaacaatgtggatctcgtgaatatcggatccactgacatcgtggacggaaaccacaagctgaccctcggcttgatctggaatatcatcctccactggcaggtcaagaacgtgatgaagaatatcatggcgggtctgcagcagactaattcggaaaagattctcctgagctgggtgaggcagtctacccgaaactaccctcaggtgaatgtcattaactttaccacgtcatggtctgacggactggccctcaacgcgctgatccactcacaccgcccggatctgtttgattggaacagtgtcgtgtgtcaacagtccgcgacccagaggctcgaacacgcatttaacatcgcgcgctaccagctcggcatcgaaaagctgttggaccctgaggatgtcgacacgacttatccagacaaaaaatccatcctcatgtacatcaccagcctcttccaggtgctgccgcagcaggtgtcaatcgaggccatccaagaagtcgagatgctgcctagaccccctaaggtcactaaggaagaacacttccagctccaccatcagatgcactactcgcaacagattaccgtgagcttggcccagggatacgagcggaccagcagcccgaagcccagattcaagtcctacgcgtacacccaagcggcctacgtgacgacctcggacccgaccagatcaccattcccgtcccaacatcttgaagcgcctgaggacaaatcattcgggtcatcgcttatggaatccgaagtgaacctggatcgctaccagactgcacttgaggaggtgctgtcgtggctcctgtcggcggaggacactctgcaggcacagggtgaaatctctaacgatgtggaggtggtcaaggaccaatttcatactcatgaaggatacatgatggaccttactgcccaccaaggacgagtgggaaacatcctgcagctgggatcaaaactgatcggaactggcaagctgagcgaagatgaagaaactgaagtccaagagcagatgaatctgttgaatagccgctgggagtgtctgcgggtggcttcgatggaaaagcaatcgaacctccaccgcgagatctcctacgtgccgagcacctacctgactgagatcacccatgtgtcccaggccctgcttgaggtggaacagctcctcaacgccccggacctgtgcgcaaaggacttcgaggacctgttcaaacaagaggaatccctcaagaacattaaggattcattgcaacagtcctcaggaagaatagacattatccactcaaagaaaaccgccgccctgcaatccgcaaccccagtggagcgggtgaaactgcaggaggccctctcgcagctcgacttccagtgggagaaggttaataagatgtacaaggatcggcagggtagattcgaccgcagcgtcgagaagtggcggagattccactatgatatcaagatttttaaccagtggctcacggaggcagaacaattcctgcggaaaactcagattccagagaactgggaacacgctaagtacaagtggtacctcaaggagttgcaggacggaatcggccagaggcagactgtggtgaggaccctgaatgccactggggaggaaatcatccaacaatcaagcaagaccgatgcgtccatactccaggaaaaattggggtccctgaatctgcggtggcaggaagtgtgcaagcaactgtcagaccggaagaaaagactggaagagactctcgaacggctccaagagctccaggaagcgaccgatgagctggatctgaagctgaggcaggccgaagtgatcaaggggtcgtggcaaccggtcggtgacctgttgatcgactccttgcaagaccatctggagaaggtgaaggcacttcgcggagagattgctcctctcaaggaaaacgtctcccacgtgaatgacctggcacgccaacttactacgctgggaatccagctttcgccttacaatctgtcgacgcttgaggatcttaatacccgctggaaactgctgcaggtggctgttgaggatcgggtcagacaactgcacgaggctcatcgcgacttcggtcccgcatcgcaacattttctgtcgacttccgtgcaggggccgtgggaacgcgcaatctcgccgaacaaggtgccatactacatcaaccatgaaacgcaaaccacctgttgggatcatccgaagatgaccgaactgtaccagtcactggctgacctcaacaacgtccgcttctcggcttatcggaccgccatgaagctgcgacggttgcagaaagccctgtgcttggacctgctctccctctcagccgcttgcgacgctcttgaccagcataatctcaagcaaaacgaccagccaatggacatcttgcagatcatcaactgcctgactaccatctatgaccgcctggaacaagagcataacaacctggtcaatgtgccgctgtgcgtggatatgtgcctcaattggttgctgaacgtgtacgacaccgggcggactggtcggatcagagtcctgagcttcaagactggcattatcagcctttgtaaagcccacctggaggataagtacagatacctcttcaagcaggtggcctcgagcaccggattctgcgaccagcgccgccttggcctgctgctccacgactcgatccaaatccctagacaactcggagaggtagcgtccttcggaggctccaacatcgagccaagcgtccgcagctgcttccagttcgcgaataacaaaccggaaatcgaagcagctctcttcctggattggatgcgcctcgagccacagtcgatggtgtggctcccagtcttgcatcgggttgccgccgctgaaaccgccaagcatcaggccaaatgcaacatctgtaaggaatgcccgatcattggattcaggtaccgctccctgaagcactttaactacgacatctgccaaagctgtttcttcagtgggagggttgccaaaggacacaaaatgcactacccaatggtggaatactgcactccgactacgtccggagaagatgttcgcgatttcgccaaagtgctgaagaataagtttcgtaccaagcggtactttgccaaacacccgagaatgggctacctgcccgtgcagactgtcctggaaggcgacaacatggaaaccgacaccatg

SEQ ID NO: 251357 - DNA, 3432 bp, synthetic construct
  misc_feature 1..3432: note = Description of Artificial Sequence: Synthetic coding sequence
  source 1..3432: mol_type = other DNA
atgctatggtgggaagaagttgaagattgttatgaacgtgaagatgtacaaaaaaaaacgtttacgaaatgggttaatgcgcaattttcgaaatttggtaaacaacatatagaaaatttattttcggatttacaagatggtcgacgtttactagatttattagaaggtctaacgggtcaaaaattaccgaaagaaaaaggttcgacgcgtgtacatgcgctaaataatgtaaataaagcgttacgtgtactacaaaataataatgttgatctagtaaatataggttcgacggatatagtagatggtaatcataaactaacgttaggtctaatatggaatataatactacattggcaagtaaaaaatgtaatgaaaaatataatggcgggtctacaacaaacgaattcggaaaaaatactactatcgtgggtacgacaatcgacgcgaaattatccgcaagttaatgtaataaattttacgacgtcgtggtcggatggtttagcgctaaatgcgctaatacattcgcatcgtccggatctatttgattggaattcggttgtttgtcaacaatcggcgacgcaacgtttagaacatgcgtttaatatagcgcgatatcaattaggtatagaaaaattattagatccggaagatgtagatacgacgtatccggataaaaaatcgatactaatgtatataacgtcgttatttcaagttttaccgcaacaagtttcgatagaagcgatacaagaagtagaaatgctaccgcgaccgccgaaagttacgaaagaagaacattttcaattacatcatcaaatgcattattcgcaacaaataacggtatcgttagcgcaaggttatgaacgtacgtcgtcgccgaaaccgcgttttaaatcgtatgcgtatacgcaagcggcgtatgtaacgacgtcggatccgacgcgatcgccgtttccgtcgcaacatttagaagcgccggaagataaatcgtttggttcgtcgctaatggaatcggaagtaaatctagatcgttatcaaacggcgctagaagaagtactatcgtggttattatcggcggaagatacgttacaagcgcaaggtgaaatatcgaatgatgtagaagtagtaaaagatcaatttcatacgcatgaaggttatatgatggatctaacggcgcatcaaggtcgtgtaggtaatatattacaattaggttcgaaattaataggtacgggtaaattatcggaagatgaagaaacggaagttcaagaacaaatgaatctactaaattcgcgttgggaatgtttacgtgtagcgtcgatggaaaaacaatcgaatttacatcgagaaatatcgtatgttccgtcgacgtatctaacggaaataacgcatgtttcgcaagcgttattagaagtagaacaattattaaatgcgccggatctatgtgcgaaagattttgaagatctatttaaacaagaagaatcgttaaaaaatataaaagattcgttacaacaatcgtcgggtcgtatagatataatacattcgaaaaaaacggcggcgctacaatcggcgacgccggttgaacgagtaaaattacaagaagcgctatcgcaactagattttcaatgggaaaaagttaataaaatgtataaagatcgacaaggtcgatttgatcgttcggttgaaaaatggcgacgatttcattatgatataaaaatatttaatcaatggctaacggaagcggaacaatttttacgaaaaacgcaaataccggaaaattgggaacatgcgaaatataaatggtatttaaaagaactacaagatggtataggtcaacgtcaaacggtagtacgtacgctaaatgcgacgggtgaagaaataatacaacaatcgtcgaaaacggatgcgtcgatattacaagaaaaactaggttcgctaaatctacgttggcaagaagtatgtaaacaattatcggatcgtaaaaaacgattagaagaaacgttagaacgtctacaagaactacaagaagcgacggatgaattagatttaaaattacgtcaagcggaagtaataaaaggttcgtggcaaccggtaggtgatttactaatagattcgttacaagatcatctagaaaaagtaaaagcgctacgaggtgaaatagcgccgttaaaagaaaatgtatcgcatgttaatgatttagcgcgtcaactaacgacgctaggtatacaattatcgccgtataatctatcgacgttagaagatttaaatacgcgttggaaattattacaagttgcggttgaagatcgagttcgtcaattacatgaagcgcatcgtgattttggtccggcgtcgcaacattttctatcgacgtcggtacaaggtccgtgggaacgtgcgatatcgccgaataaagtaccgtattatataaatcatgaaacgcaaacgacgtgttgggatcatccgaaaatgacggaactatatcaatcgttagcggatttaaataatgtacgtttttcggcgtatcgtacggcgatgaaactacgacgactacaaaaagcgctatgtctagatttattatcgctatcggcggcgtgtgatgcgttagatcaacataatttaaaacaaaatgatcaaccgatggatatattacaaataataaattgtctaacgacgatatatgatcgactagaacaagaacataataatttagttaatgtaccgttatgtgtagatatgtgtctaaattggttattaaatgtatatgatacgggtcgtacgggtcgtatacgagtactatcgtttaaaacgggtataatatcgctatgtaaagcgcatttagaagataaatatcgttatctatttaaacaagttgcgtcgtcgacgggtttttgtgatcaacgtcgtttaggtctattattacatgattcgatacaaataccgcgtcaattaggtgaagtagcgtcgtttggtggttcgaatatagaaccgtcggtacgatcgtgttttcaatttgcgaataataaaccggaaatagaagcggcgttatttttagattggatgcgtctagaaccgcaatcgatggtatggctaccggttttacatcgtgttgcggcggcggaaacggcgaaacatcaagcgaaatgtaatatatgtaaagaatgtccgataataggttttcgatatcgttcgttaaaacattttaattatgatatatgtcaatcgtgttttttttcgggtcgtgtagcgaaaggtcataaaatgcattatccgatggtagaatattgtacgccgacgacgtcgggtgaagatgtacgtgattttgcgaaagtactaaaaaataaatttcgtacgaaacgttattttgcgaaacatccgcgaatgggttatttaccggtacaaacggttttagaaggtgataatatggaaacggatacgatg

SEQ ID NO: 251358 - DNA, 3432 bp, synthetic construct
  misc_feature 1..3432: note = Description of Artificial Sequence: Synthetic coding sequence
  source 1..3432: mol_type = other DNA
atgctgtggtgggaggaggtggaggactgctacgaaagagaggacgtgcagaagaaaactttcactaagtgggttaacgcccaattttccaagtttgggaagcagcacatcgaaaatctgttttccgatttgcaggacggacgacggcttctggacctgctcgagggactgacgggtcagaagctcccaaaggagaaaggatcgacccgggtgcatgccctgaataacgtcaacaaagccctccgggtccttcaaaacaacaacgtggacctcgtcaacattgggtccactgacatcgtggatggcaaccataagctgaccctgggtctgatttggaacattatactgcactggcaggtgaagaacgtgatgaagaacattatggccggcctgcaacagaccaactcggagaaaattctcctcagctgggtgcggcaatccactcggaattatccgcaagtgaacgtgatcaactttactacttcgtggtccgacggactcgcactgaatgcgctcattcactcacaccggcctgacttgttcgactggaactcagttgtctgccaacaatcagcgacccaacgcctggaacatgctttcaatatagctcgctaccagttgggaatcgaaaaactcttggacccagaggatgtggataccacctacccggataagaaatcgatcctcatgtacattacttctctcttccaagtcctgccacagcaggtgagcatcgaagctatccaggaggtggaaatgttgccacgcccccctaaggtgactaaagaggaacatttccaactgcatcaccaaatgcactactcgcagcaaatcactgtgtcactggcgcaggggtatgaacgcacttcgtcgccgaagccacggtttaagtcctacgcctacacccaggcagcgtacgtgacgacttccgacccgacccgcagcccgttcccatcccagcatctggaggccccagaagataaatcctttggctcctcgctgatggagtcagaggtcaacctcgaccgctaccaaaccgcactggaagaggtgctgtcgtggcttctctcggcggaggataccctgcaggcacaaggggagatcagcaatgatgtggaagtggtgaaagatcaattccacactcatgaaggatatatgatggatctgacggcacaccaaggacgcgttggaaacatcctgcaactgggctcgaagctcatcggtactggtaagctgtccgaggacgaggaaactgaggtgcaggaacagatgaacttgctgaattcacgctgggagtgcctcagggtggcctcaatggaaaagcaatccaatcttcatcgcgaaatcagctatgtgccgtccacttacctcactgagatcacccacgtgtcacaggcactgctcgaggtggagcagttgctgaacgctccggatttgtgtgccaaggacttcgaagatctcttcaagcaagaggaatcattgaagaacatcaaggactcgctgcagcagtcgtctgggcggatcgatatcatccactcgaagaaaactgccgccctgcagtcagccacccctgtggagcgcgtcaagctccaggaagcactgagccagctggactttcaatgggagaaggtgaacaaaatgtacaaggacagacagggaagattcgacagatcggtggaaaagtggaggcgcttccattatgacatcaaaatcttcaatcagtggcttacggaagccgaacagttccttcgcaagactcagatcccggagaactgggagcatgccaagtacaagtggtatctgaaagagctgcaggacggaatcggacagcgccagaccgtggttcgaaccctgaacgcgaccggcgaagagatcatccaacagtcgtctaagaccgacgccagcatcctgcaggagaagctgggctcattgaacctgcgctggcaggaagtgtgcaagcagctgtcagatcgcaaaaagcgcctcgaagagactctcgaacggctccaggagcttcaggaagccactgatgaactcgacctgaagctgcggcaagcagaagtgatcaagggatcatggcagcctgtcggagatcttctgatcgattctctgcaggatcacctggaaaaggtgaaagccctgcgcggggagatcgcgccgctcaaggaaaatgtgagccacgtcaacgacctggcgagacaacttactaccttgggtattcaattgtcgccctacaatctcagtactctcgaggacttgaatactagatggaagctcttgcaggtggcggtggaggatagagtgaggcagctgcacgaagcccacagggacttcggacctgcttcccagcacttcctctctacttcagtgcaggggccatgggagcgggccatttcacctaacaaggtgccctactatatcaaccacgagactcaaactacttgctgggatcacccgaagatgaccgaactgtaccagtcactcgccgatctcaacaacgtgcggttcagcgcctaccggaccgccatgaaactgcgcaggctccagaaggcgctgtgtctcgaccttctcagcctttccgccgcttgcgatgctctggaccaacacaaccttaaacagaacgaccagccaatggacatcctccagatcatcaactgtctcactaccatctacgaccgcctggagcaggaacacaataatcttgtgaatgtgcccctctgcgtcgacatgtgcctcaactggcttctgaatgtgtacgacactggacggaccggtaggatccgcgtcctgtccttcaagactgggatcatttcattgtgtaaagcccatctggaggacaagtaccggtacctcttcaagcaggtggccagctcgactggattctgcgatcagcgcaggctgggcctgctgctgcacgattccatccagatcccgcggcagctgggagaagtggcctccttcggaggctcaaacatcgaaccttcagtgcgctcctgcttccaattcgcgaacaataagccagaaatcgaagcagcactctttcttgactggatgaggctggaaccgcagagcatggtgtggcttccagtgctgcaccgggtggccgccgcagaaaccgccaaacatcaggcgaagtgtaatatctgcaaggagtgtccgatcatcggattccgctacagatccctgaaacactttaactacgacatctgccaaagctgcttcttctcgggacgggttgcaaagggacataagatgcattaccctatggtcgagtactgcactccaactacttcaggcgaggacgtgcgcgactttgcgaaggtcctgaagaacaaatttcgcactaaaaggtatttcgctaaacaccctcgaatgggatacctgccggtgcaaaccgtgctggaaggtgacaatatggagactgacaccatg

SEQ ID NO: 251359 - DNA, 3432 bp, synthetic construct
  misc_feature 1..3432: note = Description of Artificial Sequence: Synthetic coding sequence
  source 1..3432: mol_type = other DNA
atgctgtggtgggaggaggtggaagactgctacgaacgggaagacgtccagaaaaagacctttacaaaatgggtgaatgctcagttcagcaagttcggaaagcaacacattgagaacttgtttagtgacctccaagacggacgtagacttttagacttgttggagggacttactgggcagaaactccctaaggaaaagggatcgacccgcgtccacgcactgaataacgtgaataaagccctgagagtgttgcagaataataatgtggacctggtgaacatcgggagcacagatatcgtggatggaaatcacaagctaacactggggttgatctggaatatcattctccactggcaggtaaagaacgtaatgaagaatatcatggctggcctccagcagaccaattctgagaagattctcctgtcatgggtcagacagtcaacgaggaattatccccaggtaaacgtgataaactttacaacgtcttggtcagatggacttgctctaaatgccttgattcactcgcaccgaccagacctgttcgattggaatagcgtggtctgccagcagtccgccacccaacgactggaacacgcctttaacatagcccggtaccagctgggtatcgagaagcttcttgacccagaagatgttgataccacttaccccgataaaaaaagcattctgatgtatatcacatcactgttccaagtgctgcctcagcaggtttcgatagaggccattcaagaggtggagatgctgcctcgccctccgaaagtcacaaaggaggaacatttccaactgcatcatcagatgcactattctcagcaaattaccgtgtcattagcacaggggtatgaacgcacatcaagtcccaagccccgcttcaaatcatatgcatacactcaggcggcatatgtgactacgagcgatcccacccgttccccctttccgtcgcagcacttagaggcacctgaggataagagcttcggcagctccctcatggaaagcgaagtgaatctagaccgctaccagaccgccctagaggaggtattgtcctggttgctctccgcggaggataccctgcaagctcagggagagatatccaacgatgtggaagtcgtgaaagatcaatttcatacccatgaggggtatatgatggatcttacagcgcaccagggtcgcgtgggcaacatactccaactggggtcgaaactgatcgggactggtaagcttagcgaagatgaggaaaccgaggtccaagagcaaatgaatctgctgaacagcagatgggagtgtttgcgcgtcgcctccatggaaaagcagtcaaacttgcaccgagaaatcagctatgttccttcgacttatctgacggagatcacgcacgtgtcccaggcactgctcgaagttgagcagctcctgaacgcgccggatctatgcgctaaagacttcgaagatctgtttaaacaggaagaaagtcttaagaacatcaaagattcgctgcagcagtccagtggacgaatcgatataatccactccaaaaagacggctgctctccagagcgctactcccgtggagcgggtgaagctgcaagaggcactatctcagctcgacttccaatgggaaaaggtcaataaaatgtacaaagatcggcaggggcgatttgatcggagtgtagaaaagtggaggcgatttcactacgacattaaaatctttaaccagtggctgaccgaggcagagcagttcctccgaaagacacaaatcccagaaaactgggagcacgcaaagtacaagtggtacctgaaagagttacaagatggtatcggccagagacagaccgtcgtgagaacgctgaatgctactggcgaggaaatcatccagcagtcaagcaagaccgatgcgagcatactccaggagaagctggggtctctgaatctgagatggcaggaggtatgcaaacagttatctgatcgtaaaaaacggctggaggaaaccctggagcggctccaggagctccaggaagccacagacgagctggacctgaagcttcgacaagcagaggtaataaaagggagctggcaacccgttggcgatcttttaatagatagtctccaggaccatctggagaaggtgaaggccctccgtggggaaatagccccgctcaaggagaatgtttctcacgtaaacgacctggctcgtcaactgaccacgctggggatccagctttcaccatacaatctctcaaccctggaggacctaaataccaggtggaaacttctgcaagttgccgtggaggatcgtgttagacaactgcacgaagctcaccgagactttggcccagcttcgcagcactttctatctactagcgtccaggggccttgggagagagcgatctccccaaataaagtcccgtactatatcaaccatgagacacagacgacctgttgggatcatcccaaaatgaccgagctctaccaatctctggcagacttaaataacgtcaggttctccgcctacaggaccgcaatgaaactgcggcggctgcaaaaagctttgtgtctggacctgctgtctttgtcagctgcttgtgatgccctggaccagcataacctgaagcagaatgaccaacctatggatattctccaaatcatcaattgcctgaccaccatttacgatagactcgagcaggagcataacaacctagtcaacgtgcctctctgcgtcgatatgtgcttaaattggctacttaacgtctacgacacgggcaggaccggtcgtatacgtgtgttgtcgttcaaaacaggcattattagtttgtgcaaggctcacctcgaggacaaatatcgctatctgtttaaacaagtggcctccagcacaggcttctgcgatcagcgtcgtctcgggctgctgctgcatgattcaattcagataccgaggcaactgggagaagtggcaagtttcggcggtagtaatattgagcccagcgtccggtcatgcttccagtttgcgaacaataagcccgaaattgaagcagccctgttcctggactggatgagactggaaccccaatcaatggtctggctgcctgtcctccaccgagtcgcggctgctgaaacagcaaagcaccaagccaaatgcaatatatgcaaggaatgcccgatcattggcttccggtaccgtagcctgaaacactttaattacgatatctgccagagctgctttttcagtggccgagttgcaaaaggtcataagatgcactaccccatggtcgagtattgtacgccaacaactagcggagaggatgtccgcgactttgccaaggtcttgaaaaacaagtttcgaactaaaaggtacttcgctaaacaccctcgaatgggctatctcccagtgcagactgtgcttgaaggggacaacatggaaactgacaccatg

SEQ ID NO: 251360 - DNA, 3432 bp, synthetic construct
  misc_feature 1..3432: note = Description of Artificial Sequence: Synthetic coding sequence
  source 1..3432: mol_type = other DNA
atgctctggtgggaagaggtggaggattgttatgaacgggaggacgttcagaagaagacattcacaaaatgggtgaatgcacagttctctaagttcgggaagcaacacattgagaacttgttctctgatttgcaggacggcagaagactcctagacctacttgaaggcctcaccggtcagaaattgccaaaggagaagggttcaactagagtacacgcactcaacaacgtgaataaggcgttacgagtgcttcagaataacaatgtggatttggttaacataggatccaccgacattgtagacggcaaccacaagctcaccctaggactgatttggaacatcatccttcactggcaagtgaaaaatgttatgaaaaatataatggccggactacagcagaccaattcggaaaagattctgctgtcctgggtgaggcagtcaaccagaaattacccccaggttaatgtcatcaactttacaactagctggagtgacggcctggccctgaacgcactgatccattcccataggccagatttgttcgactggaactctgtggtgtgccagcagtctgccactcagcgattggagcacgcctttaacatcgcccgctatcagctggggatcgaaaagttgctcgatcccgaagatgtggataccacctatcctgacaagaagagcattctgatgtatattacttctctctttcaggttctccctcagcaggttagcattgaggcaatccaggaggttgaaatgctgccccgacccccaaaggtgacaaaggaggagcacttccagctgcatcatcagatgcattactcacagcagataacagtaagtcttgcccaggggtacgagcggacttcttcaccgaagcctagattcaagtcatacgcttatacacaggctgcctacgtaaccaccagtgatcccactcggagcccattcccctcccaacatttggaggctcctgaggacaagagtttcggaagctcattgatggaaagcgaagtcaatttagaccgctatcagacagccctggaagaggtcctgtcttggctactgtcagccgaagacacgctgcaggcacagggagagatctctaacgacgtggaggtcgttaaggatcaattccacacccacgaagggtacatgatggacctcaccgcccatcagggacgtgtaggaaacatcctccagctcggatcaaaactgatcggaactgggaagctgagcgaagatgaagaaacagaagtgcaggagcagatgaacttgctgaattccaggtgggaatgtctccgcgtggcctctatggagaagcagtcgaacttgcaccgcgagatctcttacgtgccctccacttacctgaccgagattacccacgtgtctcaggcactgctcgaggtggagcaattgttaaacgcaccagacttgtgcgctaaagattttgaggatctcttcaaacaggaggaatccctcaaaaatatcaaagattctctgcagcagtcttcgggaagaatcgacatcatccacagcaagaaaacagccgcccttcagtctgccacacctgtggaacgggttaaactccaagaggccctgtcccagcttgactttcaatgggaaaaagtgaataaaatgtataaagaccgccaaggaagatttgacagatccgtcgagaaatggcgtaggttccactatgatatcaaaattttcaaccaatggttaaccgaggcagagcagttcctgcgcaaaactcagattccagagaattgggaacacgccaaatacaagtggtatcttaaagagcttcaggacggaatcggccaacgtcagactgtagttagaactctgaatgccaccggtgaggagataatccagcagagttccaagaccgatgcttccatcctacaagagaaactaggctctttaaacttacgctggcaggaggtgtgtaagcagctttccgaccggaagaaacggctcgaggaaaccctcgagcggctacaggagcttcaagaggcaacagacgaactcgacctcaagctgagacaggctgaggtgattaaaggctcctggcaacctgtgggtgacctgctgattgactcactgcaggaccacctggaaaaggtcaaggcactgcggggagagattgcccccttaaaggagaatgtaagccacgtaaatgacctggcgaggcaactgaccacccttggcatccagctctccccctacaatctgtcaacccttgaggacctcaacactcgttggaagctccttcaggtggccgtggaggaccgcgtccgtcagctccacgaggcgcaccgggactttggaccagcaagccaacacttcctatctacaagcgtgcagggtccctgggaaagagctatcagtcccaacaaggtcccatactatataaaccacgagacccagacaacgtgctgggatcatccaaaaatgacggagctgtaccaaagtcttgcagatcttaacaacgttagattctccgcttaccgtactgccatgaaactgcgccgcctgcagaaagccttatgtttagatctgttatcactttccgcagcatgcgacgcattggaccagcataacctgaaacagaatgaccaacccatggacatcctacaaattatcaattgcctcacgacaatctacgacagacttgaacaggagcacaacaacctggtgaacgtacctctgtgtgtagacatgtgcctcaactggctgcttaatgtgtacgacacaggccgtacaggcagaatccgggtactgagttttaaaacaggcattattagtttgtgtaaggcccaccttgaggataagtataggtacctgtttaagcaggtggcctccagcaccggattttgtgatcaacgtcgcctagggctgctcctgcacgatagcatccagattccacgccagttgggtgaggtcgcctcatttggtggcagcaatatcgaaccctcagtgcggagttgcttccagttcgctaacaacaaacccgagattgaggcagcgctttttttggactggatgcggctagaaccgcagagcatggtgtggctgcctgtactgcatcgcgtggcagctgcagaaacagccaagcaccaggccaaatgcaacatctgtaaggaatgcccaataataggatttcgatatcgatcacttaaacactttaactacgacatctgccagagctgttttttttccgggcgcgtggccaaagggcataagatgcactatccgatggtggaatattgcactccaacgacctccggcgaggatgtcagagacttcgctaaggtgctcaagaacaagtttcgtaccaaacggtacttcgcgaaacaccccagaatgggatatttacccgtgcagacggtgctcgaaggggataatatggaaacggatacaatg

SEQ ID NO: 251361 - DNA, 3432 bp, synthetic construct
  misc_feature 1..3432: note = Description of Artificial Sequence: Synthetic coding sequence
  source 1..3432: mol_type = other DNA
atgctctggtgggaagaggtcgaggactgttacgaaagagaagatgtgcagaagaagaccttcaccaaatgggtcaatgcgcagttctcaaagttcggtaagcagcatatcgaaaacctgttctcagatctccaggatgggcgccggctgctggacctcctcgaaggactgacggggcagaagctcccgaaggaaaaaggaagcactcgagttcacgcgctcaacaacgtgaacaaggcactcagagtgttgcaaaacaacaatgtggacttggtcaacatcggctctaccgacattgtggatggtaatcataagctgactcttggcctgatctggaacattatccttcactggcaagtcaaaaacgtcatgaagaatatcatggccggcctgcagcaaacgaattcggagaagatactcctctcctgggtgaggcaatcaacgaggaactaccctcaagtgaatgtgatcaacttcaccacttcctggtcagacgggctggcactcaacgcacttatccactcccaccgtcctgacctgtttgattggaactcggtggtttgccaacagagcgccacgcaacgcctggaacatgcattcaacatcgctagataccaacttggtatcgagaaacttctcgacccagaggatgtggacaccacttacccggacaagaagtcaatcctcatgtacatcaccagcctgtttcaggtgctgcctcaacaagtgtccatcgaagctatccaggaggtggagatgctgccgcgcccgccaaaggtgactaaagaagagcactttcaactgcaccatcaaatgcactactcacagcagatcaccgtgagtctggctcagggatacgaaagaactagctcgcccaaacctcgcttcaagtcatacgcatatactcaagcagcttatgtcactactagcgacccaactcgctcacctttcccctcgcagcacttggaagccccggaagacaagtccttcggatcctcgctgatggaatcagaagtgaacttggatagataccagactgccttggaagaggtgctgtcatggttgctttcggcggaggacactctgcaggcgcaaggcgagatctccaacgatgtggaggtggtgaaggatcagttccatacgcacgaaggctacatgatggacctcactgcccatcaaggaagggtgggcaatatcttgcagctcggttcgaagttgatcggtaccgggaagttgtcggaagacgaagaaaccgaagttcaagaacagatgaatttgctcaatagccgctgggagtgcctgagagtggcgagcatggagaaacagtcaaacctgcaccgggaaatctcctacgtgccctccacttacctcaccgagatcacccatgtgtcccaagccctgcttgaggtggagcaactgctgaacgcacctgacctgtgcgcgaaagacttcgaggatctctttaaacaagaagaatcgttgaagaacattaaggattcgctgcagcagtcatcaggacgaattgacatcatccactcgaaaaagaccgccgcgttgcaaagcgcaacccctgtggagcgggtgaaactgcaggaggcactcagccaactggatttccagtgggaaaaagtaaataagatgtacaaagaccggcaaggccgcttcgatcgctccgtggagaaatggagacgctttcattacgacatcaagatcttcaatcaatggctgaccgaagcggaacagttcctcagaaagacccagatccccgagaattgggaacacgctaagtacaaatggtacctcaaggagctgcaggatggcatcgggcagagacagactgttgtacgcactcttaatgcaactggcgaggagatcatccaacagtcatcaaagactgatgcttcgatcctgcaggaaaaattgggatccctgaacttgcgctggcaagaagtgtgtaagcaattgagcgacagaaaaaagagactcgaggaaaccctggaaagacttcaggagctccaggaagccactgatgaactcgatttgaagctgcgccaggccgaggtgatcaagggaagctggcagccggtgggagatcttctgatcgactccctccaagaccatctggaaaaggtcaaggcacttcggggggaaatcgcgccacttaaagaaaatgtcagccatgtgaacgatctggcgagacaactgactactctcggtatccagctgtcgccatacaacctgtcgactctcgaggatctgaatactaggtggaagctcctccaggtggcagtcgaagacagagtccggcagctccacgaggcacaccgcgactttggacctgcgtcacagcacttcctgtcgaccagtgtgcaaggaccgtgggagcgggccatctcgccgaataaagtgccgtactacatcaatcacgagactcaaactacgtgctgggaccacccgaaaatgacggaactgtaccagtcactggccgacctcaacaatgtgcggtttagtgcatataggaccgcgatgaaactgcgacgcctgcaaaaggccctgtgtttggacctcctgtccctgagcgcggcgtgtgacgcgctggaccaacataatctgaagcagaatgaccaaccaatggatatcctgcagatcattaactgccttaccactatctacgacagactcgaacaagagcacaataatctggtcaacgtgccgctgtgcgtggatatgtgtctgaactggctgctgaatgtgtacgacaccgggcgcacgggcaggatccgggtcctgtccttcaaaactggcatcatctcgctgtgcaaggcccacctggaagacaagtaccgctacctgtttaagcaagtggcgtcgagcactggattctgcgaccagcggcggctgggactgctgctgcacgatagcattcagatccctaggcagctcggcgaagtggcctcgttcggaggatcaaatatcgagccatcggtgaggtcgtgctttcagtttgccaacaacaaacccgagatcgaggcggctctctttctggattggatgaggctggaacctcagtctatggtctggttgccagtgctgcaccgggtggcggcagccgaaactgcgaagcatcaggctaagtgcaatatctgcaaagagtgcccgatcatcggtttcaggtaccggagcttgaagcattttaactacgacatttgccaatcttgcttcttctcgggtcgcgtcgcaaagggtcataagatgcactacccgatggtggagtactgcactccgaccaccagcggcgaagatgtcagagatttcgccaaagtcctcaagaacaagttccgcaccaagcgctacttcgccaagcatccgcgcatgggatatctgcctgtgcagaccgtgctggaaggtgacaacatggagactgacacgatg

SEQ ID NO: 251362 - DNA, 3432 bp, synthetic construct
  misc_feature 1..3432: note = Description of Artificial Sequence: Synthetic coding sequence
  source 1..3432: mol_type = other DNA
atgctctggtgggaagaggtggaggattgttacgaacgcgaagacgttcagaaaaaaacattcaccaagtgggttaatgctcaattcagcaagttcggtaaacaacatattgagaacctcttttcagatttgcaggacggtcggcgtctcctcgatcttttagagggacttaccggacaaaaattgccaaaggagaaaggctctacacgtgtccatgcacttaacaatgtgaataaggcactgagagtcctgcaaaacaacaacgtggatttggtgaatatcggtagcacagatatagttgatgggaatcataagctaacccttgggcttatttggaacataatcttgcattggcaagttaagaacgttatgaagaatatcatggccggcttgcagcaaactaactctgaaaaaattcttttatcttgggtgcggcagtctacacgtaattacccccaagtaaacgtcattaattttaccacatcatggtcagatgggctcgcattgaacgcattgattcattcacataggccagatctattcgactggaacagtgttgtatgtcagcagtctgcaactcagagacttgaacatgcctttaatatcgcacggtaccaacttggcattgagaagctattggatcctgaggatgttgatactacttatcctgataagaagagcatcttgatgtatattacttcattattccaggtgctgccacaacaggtttcaatcgaagcgatccaagaagttgagatgcttccaaggccaccaaaagtgacaaaagaggagcactttcagctacatcaccagatgcattatagccagcagataacagtgagcctggcccaaggttatgaacgcaccagctctccaaagccccgctttaagtcttatgcttatacccaggcagcatatgtaactacttccgatcctacaagaagtcctttcccatctcagcatttagaggcaccagaggataagagttttgggtcctcattgatggaatcggaagttaatctggacaggtaccaaactgctctcgaagaagtgctttcatggttgctgagcgctgaagatacccttcaagcccagggagagatctccaatgacgtcgaagttgttaaggatcaatttcacacccatgaaggttatatgatggatttgacagcgcaccaaggccgagtgggcaacattttgcaactcggttctaagttaattgggacaggtaagctgtccgaggacgaagagacagaggtacaggaacagatgaaccttctcaattctcgctgggaatgtttgcgcgtcgcaagtatggaaaaacaatcaaatcttcatcgggaaatatcgtatgtgccctccacgtacctgacagagattactcatgtctctcaagcattgttagaggtcgaacagttacttaatgctcccgatttatgcgctaaggactttgaagatttgtttaaacaagaagagtctcttaagaatataaaagattcacttcaacagtcctcgggacgcattgatattatccactcaaaaaaaaccgccgctttgcaatcagccacgcctgtggaaagagtaaaacttcaggaggctctaagccagttggatttccagtgggagaaggttaataaaatgtacaaagataggcaaggtcgtttcgatcgttccgtggaaaagtggcggcgttttcactacgatatcaaaatttttaaccaatggctcacagaggctgagcaattccttagaaagacccagattcccgagaattgggaacacgctaagtacaagtggtacttgaaggagttgcaagatggaattgggcagaggcagactgtcgttagaaccttaaatgctactggagaggagattattcaacaatcctctaaaactgatgctagcatccttcaggagaagcttgggtctcttaacctccgttggcaagaggtatgtaagcagctgtcagatcgtaaaaagaggctggaagagactcttgaacgactgcaggaattgcaagaagcgacagatgaactcgatcttaagctgagacaagcagaggtgattaagggttcatggcagccggtaggtgatctattgattgatagtctccaagaccatttagagaaggttaaagctctccgtggagagatcgcacctttgaaggagaatgtctcccatgttaacgatttggcacggcagctaaccaccctaggtattcagctctcaccctacaatctttctaccttggaagacttgaacacacgctggaaattactgcaagttgctgtggaagacagggttaggcaattgcacgaggctcaccgtgacttcggcccagcgtcgcagcatttcctgtccacgtctgtgcagggcccatgggagagagcaatctctcccaacaaagttccgtattatattaaccacgagacacaaaccacttgttgggatcatccgaagatgaccgagctttaccaatcccttgctgatctaaacaacgttagattttctgcttacagaacagctatgaagcttagaagacttcagaaggcattgtgtttggatttattaagtctttcggctgcctgcgatgcgttggatcaacataatctgaagcagaacgaccaaccaatggacatcctccagatcattaactgtcttacaacaatttatgatcgcttggagcaagaacacaataacttagttaatgttcccctatgcgtggatatgtgcctcaactggttactcaatgtgtatgatactggaaggaccggtcgaataagagttctttcctttaaaaccggcataatttctttgtgtaaggctcatcttgaggataagtaccgttatttattcaagcaggtcgcttcttcaaccggattctgtgatcagagaaggctcggactgctattacacgattctattcaaatacctcgacagcttggtgaagtagctagcttcggtgggagtaacattgaaccatcagttcgtagttgcttccaattcgctaataataagcccgagatcgaagccgcgctctttctcgattggatgcgactcgagcctcagtctatggtttggttgccagttctgcatcgggtagctgcagctgaaacagcgaaacaccaagccaaatgtaatatatgtaaggagtgtcccattataggatttcgttatcggagtttaaaacattttaactacgatatttgtcagagctgcttttttagtggtagagtagcaaagggacacaaaatgcattatccaatggttgaatactgtactcctacaacaagtggagaggatgttagggattttgcaaaggtgctaaagaacaagttcaggaccaaaaggtacttcgcaaaacatcctcgtatgggatatctccctgtccaaaccgtgttagaaggggacaatatggagaccgatactatg

SEQ ID NO: 251363 - DNA, 3432 bp, synthetic construct
  misc_feature 1..3432: note = Description of Artificial Sequence: Synthetic coding sequence
  source 1..3432: mol_type = other DNA
atgttgtggtgggaggaagtggaggactgctatgagcgggaagatgtccagaaaaagacttttaccaagtgggtgaatgcccaattttcgaagtttggtaaacaacatatagaaaacttgttcagcgaccttcaggatggtagacgtctgcttgacctccttgaaggactgactggccaaaaactgcctaaggagaaaggttcgacccgcgtgcatgcactgaacaacgtgaataaggcacttcgcgtcttgcagaacaacaatgtggatctggtgaatattggatcgaccgatattgtggacggaaaccacaagctgaccctgggtctgatatggaacattatcctgcattggcaggtgaaaaacgtgatgaagaacattatggcaggccttcagcaaactaattcggaaaagattcttctgtcatgggtgcgacaatcgactcggaactacccccaagtgaacgtgattaacttcactacctcgtggtctgatggtctggcactgaatgccctcatacactcccataggccagatctgttcgattggaactccgtcgtgtgccaacagtcggcaacgcagcggcttgaacacgcatttaacatagcaagataccaattggggatagaaaagttgctggatccagaagatgtggacacgacttaccctgataagaaatcgatcctgatgtacattacctcacttttccaagtgcttccacagcaggtgtcgatcgaagcaattcaagaagtcgaaatgctgcctaggccacctaaagtgaccaaggaggaacattttcaactgcatcatcagatgcattattctcagcagattactgtgtcgctcgcgcagggatacgaacggacctcgtcacccaagcctagatttaagtcatacgcatacacccaagcggcctacgtcactacttcagaccctacccggtcacccttcccatcacaacatctggaggcgcctgaggataagtcctttggtagttcgcttatggaatcggaagtgaacctggatcggtaccagaccgccctggaagaagtcctctcttggctgctctcagctgaggataccctgcaagcgcaaggcgagatctccaacgacgtcgaggtcgtgaaagaccagtttcacacccatgagggctacatgatggacctgactgcacatcagggaagagtcggtaacattcttcaacttgggtcgaaattgattggaactggtaagctgtctgaggatgaggaaactgaagtgcaagaacagatgaacttgcttaactcccgatgggaatgcctcagagtggcttcaatggagaagcaatcgaatctgcaccgagaaatttcatacgtgccctccacctacctgaccgaaatcacgcatgtctcgcaagcacttctggaggtcgaacagttgttgaatgcacctgacctttgtgcaaaagatttcgaagatcttttcaaacaggaagagagcttgaaaaacatcaaagattcgctccaacaatcctccggaaggatagatatcatccactccaaaaagacggcggcgctgcaatcggcaactccagttgagcgggtgaagctccaggaagcactttcgcagctcgactttcaatgggaaaaggtcaacaagatgtacaaggaccgacagggcagattcgatagatcggtggaaaagtggaggcggttccattacgacattaagatattcaatcagtggcttaccgaagcagagcagtttcttcgcaaaacgcagataccagagaattgggagcatgctaagtataagtggtacttgaaggaacttcaagatgggatcgggcagagacagacggtggtcagaaccctgaatgcaacgggcgaggaaatcattcagcaatcctctaaaactgacgcctcgatcctccaagaaaagctcggaagccttaatctccgctggcaggaggtgtgtaaacaattgtcagatcgcaagaagcggttggaagaaactctcgaaaggcttcaagaattgcaggaggcaactgacgaactggacctgaaactccggcaggcagaagtgataaaggggagctggcaacccgtgggagatcttctgatagacagcctgcaagaccatctcgagaaagtcaaggcgcttagaggagaaatcgcgcctctgaaggaaaatgtttcgcacgtgaacgaccttgcacgtcaacttactaccttgggaatacagctttcgccgtacaacctttccactcttgaagatctgaatactcggtggaaactgctccaagtggccgtagaagatcgtgttagacaattgcacgaagcccatcgagactttgggcctgcatcacaacactttctctcgacgtccgtgcaaggaccatgggaacgcgccatctcgcccaacaaagtcccatactacattaaccacgaaactcagaccacgtgctgggaccatccgaagatgaccgagctctatcaatcgctcgccgaccttaacaatgtcaggttctccgcctacaggaccgctatgaaactcagacggctccaaaaggcgctttgccttgatcttctgtccctttcggcagcttgtgacgcgctcgatcagcataaccttaaacagaacgatcagccgatggatattcttcagatcatcaattgtctgaccactatctacgatcgtctcgagcaggaacacaacaacctggtgaacgttcctctttgtgtggatatgtgtctgaattggcttcttaacgtctacgatactggaagaaccggcagaatccgggtgctttcgtttaagactggcataatcagtctgtgtaaggcccatctggaagataagtacagataccttttcaagcaagtcgcaagtagcacgggtttttgcgaccagcgcaggctgggactgctgcttcatgattcgattcaaattcctcgtcagcttggggaagtggcatcgttcggagggtcgaacattgagccgtcagtgaggtcctgttttcaatttgcgaataacaagcctgaaatagaagcagccctttttctcgattggatgcgcctggagcctcagagcatggtctggctgccagtcttgcaccgcgtggccgcagcagaaaccgctaaacaccaagcaaagtgtaacatttgtaaagaatgtccaatcatcggcttccgctaccgatccctcaagcacttcaattacgacatttgtcagagctgcttcttttctggacgtgtcgccaagggacataagatgcactacccaatggttgaatactgtacgcccaccaccagcggagaggatgtgcgtgactttgccaaagtgcttaagaataagtttcgaaccaaacgatactttgcaaaacaccctcgaatgggatacctgccagtgcagaccgttctcgaaggagataacatggaaaccgataccatg

SEQ ID NO: 251364 - DNA, 3432 bp, synthetic construct
  misc_feature 1..3432: note = Description of Artificial Sequence: Synthetic coding sequence
  source 1..3432: mol_type = other DNA
atgctatggtgggaggaggtggaggactgttatgagagggaggatgtacaaaaaaagaccttcactaagtgggtcaatgcccagttctcaaagttcggtaagcagcacattgaaaacctcttctctgacctacaggatggacggaggcttctagaccttcttgaaggcctgacagggcaaaagctgcctaaggaaaagggatccactcgcgtccatgccttaaacaacgtaaacaaggccctgcgcgtgctgcagaataacaatgtcgacctagtgaatatcggctccactgatattgtggacggaaatcataagttaactctcggattgatatggaatattatcctacattggcaggttaagaacgttatgaaaaatatcatggcaggtttgcagcaaactaacagtgagaaaatcctgctgagttgggtccgacagtcaacgagaaactatccacaggtcaatgtcattaattttactacatcgtggtctgatggcctagccttgaacgccctcatacacagtcatagaccagacctctttgactggaactctgtggtgtgtcagcagagtgctacccagcgactcgagcacgcgtttaacatcgccaggtaccagctgggaattgagaagcttttggaccccgaggatgtggacactacttaccctgacaaaaagagtattctgatgtatatcacatccctgtttcaagtgctgccacagcaggtctctattgaggctatccaagaggtggaaatgttgcccagacctccgaaggttacgaaggaggaacattttcagttgcaccaccagatgcattattcccagcagatcacagtttccctcgcccagggctacgagcggacctcctcacccaaaccccggtttaagtcctatgcatatactcaggctgcatatgtgactacaagtgaccctacaaggagtcccttcccatctcagcatctggaggctcccgaggataagtcttttgggtctagtctcatggagtccgaggtaaaccttgatcgttaccagaccgctctggaggaggtgctgagctggctgctttcagctgaagatactctgcaggcccagggcgagatcagcaatgatgttgaagtggtgaaggaccaatttcatactcacgaggggtacatgatggacctcaccgctcaccaagggcgcgtgggtaatatcctgcaattaggcagcaagcttatagggactggcaaacttagcgaggacgaagaaactgaggtgcaggagcaaatgaatctacttaactcaaggtgggagtgtctcagagtggcctctatggagaagcagtcaaatctgcacagggaaataagttacgtgccaagcacatacctgaccgagatcacccacgtcagccaagcccttctcgaagtggagcagctgctgaacgcgcccgatctgtgcgctaaagattttgaggacctttttaaacaggaggagtcattaaagaacattaaagactcattacagcagtcttccgggaggatcgacatcatccattccaagaagacagccgctcttcagagtgccacccctgtggagagagtaaagctgcaggaagcactaagccagctggatttccaatgggaaaaggtgaacaagatgtataaagatcggcaggggagattcgatcgcagcgtcgagaagtggcgcaggttccattacgacatcaagatcttcaatcaatggctgacggaggcagagcagttcctccgcaagacccagatcccggagaactgggaacacgcaaagtacaaatggtatctgaaagaactacaggacggcattggtcaacggcagaccgtggtacgtaccttgaacgcaactggcgaggagataattcagcagtctagcaagaccgatgctagcattctgcaagagaaattgggttctctgaatttaagatggcaagaggtgtgcaaacaactcagtgataggaaaaagcgactggaagagaccctcgaacgtctgcaggagctgcaagaggccactgatgaactggacttgaaactccgtcaggcggaggtaataaaagggtcttggcagccagtgggggatctgctcatcgactccttacaagatcacctcgagaaggtaaaagctctaaggggggaaattgcccccttgaaggagaatgtttcccatgtgaatgacctggcacgacagctcaccacgctgggcattcaactgtccccctataatctgtctactttggaagatctaaacaccaggtggaaactacttcaagtggctgtcgaagaccgggtgaggcagcttcatgaggcccatcgagattttgggcccgcttcccagcacttcctgagcacctccgtgcagggtccatgggaaagggcgatctcccctaacaaggtgccctactacatcaatcacgagacacagacgacgtgttgggaccaccctaaaatgactgaactataccaatccctggccgatctcaataacgtcaggtttagcgcgtaccgcacagcaatgaaacttagacggctacaaaaagctctgtgcctggatttgctctcactatctgccgcttgtgatgccttggatcagcacaacctcaagcagaacgaccagcctatggacatcttgcaaatcatcaactgccttacgactatctatgatcgcctggagcaggagcataataacttggtgaatgtgcccctttgcgtggacatgtgcttaaactggctgttgaacgtgtacgacaccgggcgaacaggccgcattcgtgtgcttagctttaagaccgggattattagtttatgtaaggcccacctggaagacaaatacaggtatctcttcaaacaggtcgcctcatctactggtttttgtgatcagaggaggctcgggctcctacttcatgatagtatccagattccaagacagctgggagaagtggcatcatttggggggtctaacattgagccctcagtgagatcctgcttccagttcgccaataacaagccggaaatcgaggccgctctgtttttggactggatgaggctcgaaccacaatccatggtgtggctccctgtgctccatcgggtggccgcggccgagaccgccaagcatcaggcaaaatgcaatatttgcaaggagtgtcctataatagggttccggtacaggtctttgaagcacttcaactacgacatttgtcagtcatgcttcttctcaggccgtgtagcgaaggggcacaaaatgcactaccctatggtggagtactgtacacctacaacgtccggcgaggatgtgcgcgacttcgctaaagtgctgaaaaacaagttccggacgaagcggtactttgcgaaacacccacggatggggtacctgcctgtccaaacagtcctcgagggggacaatatggagactgacacaatg

SEQ ID NO: 251365 - DNA, 3432 bp, synthetic construct
  misc_feature 1..3432: note = Description of Artificial Sequence: Synthetic coding sequence
  source 1..3432: mol_type = other DNA
atgctgtggtgggaggaagtggaagattgctacgagagggaagacgtgcagaaaaaaacgtttacaaagtgggttaacgcccagttttcgaagttcggaaaacagcacatcgagaacctgttctccgacctacaggacggaagaagactgctcgacttgctggaagggctaactgggcagaagctccccaaggagaagggctccacccgagtccacgctctgaataatgtgaataaagcactgcgcgtcttgcaaaataacaacgtggatctagtgaatataggatctacggacatcgtagacggcaatcacaagctcactttgggcctgatatggaatatcatattgcattggcaggtgaagaacgttatgaaaaacatcatggccggcctgcagcagacgaactccgaaaagatcttgcttagctgggtcagacagtccacacgaaactaccctcaggtcaatgtaatcaattttacaacatcttggtcagacggtctcgccctgaacgcacttatccatagccatcggccagatctttttgattggaattctgtcgtgtgccagcagagcgctacccaacgactggaacatgccttcaacattgcaagataccagttagggatcgagaaactgcttgacccagaggacgtcgatactacttaccctgataagaagagcatcctgatgtacataacgagcctgttccaggtgctgccccaacaggtttcaatcgaggcgattcaagaggttgaaatgttgcccaggccaccaaaggtgactaaagaggagcatttccagcttcatcatcagatgcactacagccagcagattacagttagcctggctcagggttacgagaggacatcaagcccaaagcctaggtttaagtcctacgcctatacccaggccgcctatgtgactacgtcagatcccaccaggtccccatttccaagccagcatctggaagctccggaagacaaatcttttggaagctcactgatggagtctgaagtgaatctggataggtatcagaccgcactggaggaggtactctcttggttgctgagtgcggaggacaccctgcaggcccagggagagatctccaacgatgtagaggtagtgaaggatcagttccatacacacgaagggtatatgatggatctcacagcccatcaggggcgcgtgggcaacatcctgcagcttgggtccaagctgatcggcaccggaaaactctctgaggacgaggagaccgaggtccaggaacagatgaacctgttaaactcccgttgggagtgccttcgcgtggcctccatggagaaacaatctaatctccaccgggagattagttacgtgccatcaacttatctaacggagatcactcacgtatctcaggcactactggaagtggagcagctcctgaacgcccccgacctttgtgccaaggatttcgaggatctgtttaaacaggaggaatccctgaagaacatcaaggattccctgcagcagtcctctgggagaatcgacatcatccactccaaaaagaccgccgcccttcagagcgcaacccccgtagagcgggtcaaactccaagaggcacttagccagctggattttcagtgggaaaaagtaaacaagatgtacaaggatagacagggcagatttgatcgcagcgtggagaagtggaggcgtttccactacgacataaaaatcttcaatcaatggctgacagaggctgagcagttcctaagaaaaacgcagattcccgagaactgggagcatgctaagtacaaatggtatctgaaggagctgcaagatggtattggtcaacggcagactgtggtccgaaccctgaacgctacaggtgaagaaatcattcagcaaagctctaaaactgacgcaagcatcctgcaggagaaacttggatccttgaaccttcgctggcaggaggtgtgtaagcagctttccgaccgaaaaaagcgcttagaggagacattagagcgtctgcaggaactgcaggaggcaacagacgagctggacttgaaattacggcaggctgaggtgattaagggtagctggcaacctgtcggcgaccttcttatcgacagtctacaagaccacctggaaaaggtgaaggccctgcgaggtgagattgcacccctgaaggagaacgtgagccatgtcaatgatcttgcacggcagcttacaaccttggggatccagctgtccccctataacctgtcgaccctggaggatctcaacacacgatggaaactgttgcaagtggccgtggaagatagggtgaggcaactgcacgaagctcatcgcgactttggcccggccagtcaacactttttatctaccagtgtccaggggccatgggaaagagctattagccctaataaggtaccctattacattaaccacgagacccagaccacatgttgggaccatccaaagatgactgagttgtatcagtccttggcggatttaaacaacgtgagattttcggcttatagaaccgcgatgaagctcagaagacttcagaaagctttgtgcctggatctcctatccctgtcggcagcatgtgacgctctcgatcagcacaacctaaagcagaatgaccagccaatggatatcctgcagatcatcaattgtctgaccactatctacgacaggctcgaacaagaacacaataatctcgtgaatgttcccctctgcgtggacatgtgcctgaattggctcctgaatgtctatgataccgggaggactggccgaattcgcgtgctgtcatttaagacaggcataatttccctgtgcaaggcacacctggaggataaatatcgctatttgttcaagcaggtcgcttcgagcactggattctgcgatcagcgaaggcttggtctgctcctccatgactctatccaaatccctcgccagctgggtgaggtcgcatcttttggtgggagcaatatcgaaccaagcgtgcgctcttgtttccaattcgcgaacaacaagcctgaaatcgaggcagccctctttctcgattggatgagactggagccccagtccatggtgtggctccctgtcttacaccgggtggcagccgctgagaccgcaaagcatcaggcgaagtgcaacatctgcaaggagtgccccatcatagggtttaggtatagatctctgaagcatttcaactacgacatttgccagtcctgcttcttctccgggagagtagccaaaggacataagatgcactatcctatggtcgaatactgcacacctacaacctcaggtgaagacgtccgcgacttcgcaaaagtcttgaaaaacaaatttcggacgaagcgatatttcgcgaaacacccccggatgggatacctgcccgtgcaaacggtgcttgagggggacaatatggaaaccgacacaatg

SEQ ID NO: 251366 - DNA, 3432 bp, synthetic construct
  misc_feature 1..3432: note = Description of Artificial Sequence: Synthetic coding sequence
  source 1..3432: mol_type = other DNA
atgctctggtgggaagaggtggaggattgctacgaacgggaagacgtccagaagaagactttcaccaagtgggtgaacgcgcagtttagtaagtttggaaaacagcatattgagaatctgttttccgatcttcaggatgggcgccggctactcgatctgttagaaggcttgacaggtcagaagctgcctaaagaaaagggcagcaccagggttcatgcgttaaataatgtgaacaaggctctacgagtcttgcagaataacaatgtggacctcgtgaatattggatccactgatatagtagacgggaaccataagttgactctgggcttgatttggaacataattttgcactggcaggttaaaaatgtcatgaaaaacattatggctgggctacaacagacgaactccgagaagatattactgagctgggtgcgtcaaagcaccaggaattaccctcaggtgaacgtgattaacttcactacgtcatggagcgacggtttggcacttaatgcgttgatccactcgcacagaccggacctattcgattggaattcagtggtgtgccagcagtctgctacacagagactggagcatgccttcaacatcgctcggtatcagctggggatcgaaaagttgctcgatcccgaggacgtcgacacaacctatcccgataagaagagcatacttatgtacattacctccctcttccaggtgctcccacagcaggtgagcatcgaagcaatccaagaggtcgaaatgttgcctcgccctccgaaagtgactaaagaggagcacttccagctgcatcaccagatgcactacagccagcaaattacagtctcactcgcccagggttatgaaagaacatcgtcccccaagcctaggttcaagagctacgcgtacactcaggctgcatacgtcaccacctccgatcccactagatcgccgtttccgtctcagcaccttgaggcacctgaagataaatcctttgggtcatcactgatggagtctgaagtgaacctcgatcgttatcagactgctctcgaagaggtactcagctggctgttgagtgctgaagacactctgcaggcccaaggcgagattagcaatgatgtggaagtggtaaaggaccaatttcatacccatgagggctatatgatggatctaacagcacaccaaggccgagtgggaaacatcctccagctgggctctaaactgattggtaccggtaaactaagtgaggacgaagagacggaagtccaggagcaaatgaatctgctcaacagccgttgggagtgtctacgagtcgcttccatggaaaagcagagcaatttacatcgcgagatctcctacgtgcccagcacatatcttaccgaaatcacacatgtgtcgcaggcgctgttggaggtggaacagctcctgaacgccccggacttgtgtgccaaggatttcgaagacttatttaagcaggaggaaagcttgaaaaatataaaagatagcctccagcagagttccgggcgaattgacattatacattcaaaaaagactgctgcacttcagtctgctacacccgtggagagagtcaaattgcaggaagcgctctcccaactcgacttccagtgggagaaagtgaacaagatgtataaggaccgacagggacggttcgaccggtccgtcgaaaagtggcggcgattccactacgacattaaaatcttcaaccagtggttgacagaagccgagcagtttctgcgaaagacacagatccctgaaaattgggaacacgccaaatataaatggtacctgaaggaactgcaggatggtattgggcagcgtcagacagttgtgaggacactaaatgctaccggggaggaaatcatacagcagtctagcaagacggatgcgtcaatcttgcaagaaaaactgggatctctgaatctgagatggcaggaggtgtgtaagcagctttctgataggaagaaacgtctggaagagactctcgagagactgcaggagctccaagaagcaaccgacgagttggatctgaaactaagacaggccgaggttatcaagggcagttggcaaccagtaggcgatcttttgattgactccttgcaggaccacctcgagaaggtcaaggccctgcgtggggagatagcccctctcaaggaaaacgtgagtcacgttaacgatctggccagacagctgactaccctgggcattcaattgtcaccctacaacctgagcaccctggaggacctcaatactcgatggaagctccttcaggtcgctgtggaggatagggtgagacagcttcacgaggcccatcgcgactttggtcccgcctcacagcattttttatctaccagtgtccagggaccatgggaacgggccattagtcccaataaagtaccctattatattaatcacgaaacacagactacttgctgggaccacccaaaaatgacagagctttaccagtcacttgcagacctcaataatgttcggttcagcgcctaccgcactgccatgaagctccggcggctccaaaaggcgctttgccttgaccttctgagtctgtcagccgcctgtgacgcactggatcagcacaacttgaaacagaacgaccagcctatggatatactgcagatcattaattgcctaacgacaatctatgacagactagaacaggagcataacaatctggtgaatgtgccactgtgcgtggatatgtgtctcaattggcttctcaacgtgtacgacaccggcagaacagggcggataagggttctttcttttaaaaccgggattataagcctctgtaaggctcacctggaggataagtatagatacctgttcaaacaggttgcaagctcaacggggttttgtgatcagcgtagactcggcttactgttacatgattccattcagatccccagacaactcggagaagtggcatcattcggcggctctaatatcgaaccatccgtcaggtcttgcttccagttcgccaataacaagcctgagattgaggctgctctcttcctcgactggatgaggttagagccacagagcatggtttggttgcctgtccttcatagggttgcagcggccgaaactgccaagcaccaggccaagtgtaacatatgcaaagaatgtccgattattgggttcaggtataggagtctaaaacattttaactatgacatctgccaaagctgttttttctctggaagggttgcaaaaggccacaagatgcactaccccatggtggagtattgcaccccaacaacctctggtgaggacgtccgggacttcgcaaaagttctgaagaataagttcaggacaaaacggtatttcgccaagcaccctaggatggggtacttgcccgtccagactgtgctggaaggggataacatggagacggacaccatg

SEQ ID NO: 251367 - DNA, 3432 bp, synthetic construct
  misc_feature 1..3432: note = Description of Artificial Sequence: Synthetic coding sequence
  source 1..3432: mol_type = other DNA
atgctgtggtgggaggaagtcgaggattgttatgagagagaagacgtccagaaaaagaccttcaccaagtgggttaatgcccagttttcgaaattcggcaagcagcatatcgaaaacctgttctctgatctccaggatggccgtcggttgctcgatctactggaaggcctgaccggccaaaagttaccaaaggaaaagggatctacccgtgtccatgctcttaacaacgtcaataaggccctccgcgtcttgcaaaataacaacgtggacctggtgaatattggtagcaccgatatcgttgatggcaaccacaagttgaccttaggcctcatctggaacattatcctccactggcaagtcaaaaatgtaatgaaaaacatcatggccggactccagcagactaattccgagaagatcctgctgtcgtgggtgcgtcagagtacacggaattacccgcaagtaaacgtaataaacttcaccacgtcctggagcgatggcctggccctgaacgcgttgattcactcgcaccgcccagatctgtttgattggaactcggttgtttgccagcaatccgccacgcagcgcctcgagcacgcttttaacatcgctcggtaccagctcggcatcgagaagcttctggatccagaagacgttgacacgacctacccggacaagaaatccatcctgatgtacattacgagtctgtttcaagtcctgccccagcaggtttcgatcgaggccattcaagaagtggagatgctacctcgcccaccaaaggtgacaaaagaggagcatttccagctacatcaccagatgcattactcccaacagattactgtgtccttggctcagggctacgagaggaccagttcgcctaaaccacgcttcaaatcatacgcctatacccaggcggcttacgtcacgacctccgacccaacgcggtccccattccccagccagcatctggaggctccggaggataagagtttcggctcgagtctgatggagtccgaagtgaacctggatcgataccaaaccgccctagaggaagtcctgtcttggctgctctccgcagaggacacattgcaagcccaaggagagatctcgaacgatgtcgaggttgttaaagaccagttccatacccacgaagggtacatgatggacttgaccgcacatcagggacgtgtgggcaacatcctgcaactcggaagcaagctgattggtacagggaagttaagcgaggacgaggagaccgaggtgcaggaacaaatgaatttgttgaattcacgctgggagtgcctgagggtggcctccatggaaaagcagtctaacttgcatagagagatcagttatgtcccatccacctacctcacggaaatcacacatgtttcccaggctcttctggaggtggagcagctgttgaacgcccccgacttgtgcgcgaaggattttgaagatctattcaagcaggaggagagcctgaaaaatattaaggatagcctgcagcagtcctcagggcgaattgatatcatccactcaaagaagacagcagcgcttcagtccgcgacgccggtggagagggtgaagctgcaggaggctctaagtcagctggacttccaatgggagaaggtgaacaagatgtacaaggaccgtcagggacgcttcgacaggagcgtcgagaagtggcgtagattccactacgacattaagatttttaaccagtggctgactgaggcggagcaatttttgaggaaaacccagatccccgagaactgggagcatgccaagtataagtggtatttgaaggaactgcaggatggaataggacagcgccagaccgtggtgaggacattgaacgccacgggagaagagattattcaacagagctcaaaaactgatgcgtcaattctgcaagagaagttgggcagcctgaacctgcgatggcaagaggtttgcaagcagctgtccgaccgcaagaagcgactggaggaaaccttggagcgtcttcaagaattacaggaagcaacggacgagcttgatctgaagctgcggcaggccgaagtgattaagggtagctggcagccagtgggtgaccttttgattgactctctgcaggatcacctagagaaggtcaaggcgttgcggggtgagatcgcacctctgaaggaaaacgtttcccatgtcaatgaccttgccagacaattaactaccctaggtattcagttaagcccgtataatctgtccaccttagaggatctgaacacccgctggaagctgttgcaggtggccgttgaggatcgggtgcgccaactgcacgaggctcacagagattttggcccggccagccagcacttcctaagcacgagtgttcagggaccctgggaaagggctatctccccgaataaggtaccgtattacataaatcatgagacgcagaccacctgctgggatcatcctaagatgaccgaactataccaatccctggcggatttgaacaatgttaggtttagcgcctatcgcactgccatgaagctgcgccggctgcagaaagccttgtgtttggatttgctgtccctctccgctgcctgcgacgcactggaccaacacaacttgaagcagaatgatcaacccatggacattttgcagatcatcaactgcctgaccactatctacgaccggctcgaacaggagcacaataacctggtgaatgtgcccctgtgcgtagacatgtgtctgaactggttgttgaatgtttatgatactggtagaaccggccgcatcagggtgctgagctttaaaacgggaatcatctccctgtgcaaggcgcatctagaggataagtaccgctacctgttcaagcaggtagcttctagcactggtttttgcgaccagcgtcgactgggcttgctgttacacgatagtattcagataccgcgccagctcggagaagttgcttccttcggtgggtccaacatagagccctcggtgcgttcctgcttccagttcgccaacaacaagcccgagatcgaggccgctctattcctagattggatgaggttggagccccagagtatggtctggctgcccgtactacatcgcgtggccgccgccgagactgccaaacaccaggctaagtgcaacatctgtaaggagtgcccgatcattggattccggtaccggtccctgaagcactttaactatgatatatgtcaatcgtgctttttctccggccgtgtggcaaaaggccacaaaatgcactatcctatggtggaatactgcactcctacaacctcgggcgaggatgtcagggatttcgcaaaggtgcttaagaacaagttccggaccaaacggtactttgccaaacaccctcgcatgggatacttgccggtgcagaccgtgttagagggcgataatatggagactgatacgatg

SEQ ID NO: 251368 - DNA, 3432 bp, synthetic construct
  misc_feature 1..3432: note = Description of Artificial Sequence: Synthetic coding sequence
  source 1..3432: mol_type = other DNA
atgctatggtgggaagaggtggaagactgttatgaacgggaggatgtgcagaagaaaacatttactaaatgggtcaacgctcagttctctaaatttgggaaacagcacatcgagaaccttttctccgacctgcaagacggaagacgtttactagatttgttggagggcctcaccggtcagaaactgccaaaagagaagggctccacaagagtgcatgcactaaacaacgtaaataaggcactgcgcgtattgcagaataataatgtggatctggttaatataggctccactgatattgttgatggtaaccataagctgacactgggcctgatttggaacataatcttacattggcaggtgaaaaacgtaatgaagaacatcatggcgggattgcagcagactaacagtgaaaaaattctcctgagttgggttcgtcaatccaccagaaattacccccaggttaatgttatcaactttacaactagttggtctgatggcttggccctgaatgccctgatacattcacaccgtcccgacctttttgactggaacagcgtggtgtgccaacagagcgcgacgcagcggttagagcatgcgttcaacattgcccgctatcaactcggcatcgagaagttgctggatccggaggacgttgacacaacctacccagacaagaagtccattctgatgtatattacttctctgtttcaggtgctgccccagcaggtgtctattgaggccattcaggaggtcgaaatgctgccacgcccacccaaagttacaaaagaagaacatttccagctgcaccaccagatgcactattcacagcagatcacagtaagcctagctcaggggtacgagagaaccagctcaccgaagcctaggttcaaaagttatgcctatacccaagctgcttatgtgactacttcagatcctacaagatctccttttcccagccaacacctcgaagcacctgaggataagtccttcggcagctccctcatggagagcgaagtcaatctcgacagataccagacagctttagaggaggtgctgtcctggctgcttagcgcggaggatactctgcaggcgcagggagagatttccaacgatgttgaagtggtcaaagatcaattccacacccatgaggggtatatgatggatctgactgcgcaccagggaagagtggggaatattctgcaactcggttcaaagttgattgggaccggcaagctgtccgaagacgaggaaactgaagttcaggaacagatgaacctgcttaacagtcggtgggaatgtctgcgcgttgccagtatggagaaacaaagcaacctgcacagagagattagttatgtgccttccacctaccttacagagattacacacgtttcgcaggccctgctggaggtagaacagctgctgaatgctccagacctgtgtgcaaaagatttcgaagatctgttcaagcaggaggagtctctgaagaacattaaggattccctgcagcagagcagcggccggatcgatattattcattccaaaaagaccgcagccctacaatccgccacaccagtagagagggtgaagctgcaggaggctctgagtcagctggactttcaatgggaaaaggtgaataagatgtacaaggatcggcaaggccgattcgatcgctctgtggaaaagtggaggcgcttccattacgacattaagatcttcaatcagtggctcaccgaggccgaacaatttctgcggaagacccaaattcccgagaattgggagcacgctaaatacaagtggtaccttaaagaactgcaggatgggattggacagaggcagaccgtggtccgaacactaaatgcaaccggggaggaaatcattcagcaaagctcaaagacagacgccagcattttacaggagaagctgggaagcttaaatctgagatggcaagaggtgtgtaaacaactctccgacagaaagaagcgattggaagagactctggagaggctccaagagttgcaggaagcgactgacgagcttgatctgaaacttcggcaagcagaggtgattaagggaagctggcagcctgtgggagacctgttaatcgattccctgcaagaccatcttgaaaaggtaaaagccctgcggggcgagatcgcaccacttaaagaaaatgtcagccatgtgaatgacctggcccggcaactaacgaccctcggcattcagttatctccatacaatctctctacactggaagacttgaacacccggtggaagctgctgcaggtggccgtggaggatcgggtgagacagctgcacgaagcccatcgcgattttgggcccgcctcccaacactttctaagcacctcagttcagggcccttgggaacgggccatcagtccgaacaaggtgccttattacatcaatcacgaaacccagaccacttgttgggaccaccccaaaatgactgaactgtaccaaagcctggcagacctgaataatgtacgattctcagcttatagaaccgctatgaaactgcgacggctccaaaaagcactgtgtctggaccttctgtctctgtccgcagcctgcgacgcactggaccagcacaacttgaagcagaacgaccaaccgatggacattctgcaaattatcaattgtcttacgactatctatgatagactggaacaagaacacaacaacctcgtgaatgtgcctctgtgcgtagatatgtgcctcaattggctccttaacgtctatgatactggtagaacagggcggatcagggtcctctctttcaaaaccggaataatcagcttgtgtaaggctcatctggaagacaaatatcggtacctgtttaagcaggtagcttcgagtaccggtttttgcgatcagcgacggctgggtctgctgctgcacgactctatacagattccacggcagctgggcgaggtcgctagtttcggagggtccaatatagaaccatccgttagaagctgctttcaattcgcaaacaataagccggagattgaggctgctctgttcctggattggatgaggctcgaaccgcagagcatggtgtggctcccggtcctgcaccgtgtggctgcagctgaaaccgccaaacaccaggctaagtgcaatatctgtaaagagtgccccatcattggatttcgctatcgctctctgaaacactttaactatgatatatgccagagctgctttttttccggcagagtcgcaaagggccacaagatgcactatcccatggtcgagtactgtaccccaactaccagtggcgaggacgtgcgagacttcgctaaggtacttaaaaacaagttccgaaccaagcggtacttcgctaagcatcccaggatgggctatcttcctgtgcagaccgtattagagggtgataacatggagaccgatacaatg

SEQ ID NO: 251369 - DNA, 3432 bp, synthetic construct
  misc_feature 1..3432: note = Description of Artificial Sequence: Synthetic coding sequence
  source 1..3432: mol_type = other DNA
atgctgtggtgggaggaagtggaagattgttacgagagagaggacgtgcagaagaaaactttcactaagtgggtgaacgctcagttctcaaagtttggaaagcagcacattgaaaacctcttcagcgacctgcaggacggacgccgcctccttgacttgctggaaggcctgactggacagaagctcccgaaagagaagggatccactagggtgcacgccttgaataatgtgaataaggcgttgcgcgtcctgcaaaacaacaacgtcgaccttgtcaacatcggaagcactgacatcgtggacggcaatcataaactgaccctgggcctcatctggaatatcatcctgcactggcaagtgaagaatgtaatgaagaacattatggctggcctccagcagaccaattcggagaagattttgctgtcgtgggttagacagtcaactagaaattaccctcaagtcaatgtgatcaacttcactacttcctggtcggatggactcgccctcaacgcacttatccatagccatcggcctgacctgtttgattggaattcagtggtgtgccagcagtccgccactcagaggctggagcacgctttcaacatcgcaagataccagctcgggatcgaaaagttgctggaccctgaagatgtggacactacctaccctgataagaagtccattctgatgtacattacgtcgttgttccaagtgctccctcaacaagtctcgatcgaggccatccaggaagtcgagatgctccccagaccgcccaaggtgaccaaagaggaacacttccagctccaccatcagatgcattactcgcaacagatcactgtgtccctcgctcagggatacgagcgcacctccagccccaagccgcgctttaagagctatgcatacactcaggcggcatacgtcacgacttcggacccaactagatcgcctttcccgagccaacacctggaagcacctgaggacaagagctttgggagctccctgatggagtcggaggtgaatctggaccgctaccaaactgcgctcgaagaagtcctgtcctggctcctgtctgccgaggacaccctgcaggcacaaggagagatcagcaacgacgtggaagtggtcaaggatcagttccacactcacgagggatacatgatggatcttaccgcgcatcagggacgagtgggaaacatcctgcaactgggctcaaaactcatcggaaccggcaagctctcggaggatgaagaaactgaggtgcaagaacaaatgaaccttctcaactcccgctgggagtgtctgagggtcgcgtcgatggaaaagcaatcgaacctgcatcgggagatttcctacgtcccatccacttacttgaccgaaataacccacgtttcccaggccctgctggaagtcgagcagctgctgaacgcacctgacctgtgtgcaaaagacttcgaggatctgttcaagcaagaagaatcgctgaagaatatcaaggactcgctccagcagagctccggacggatcgacattatccactcgaaaaagactgctgccctgcagtcggccactcccgtggaacgagtgaagctccaggaagcgctgtctcaactggatttccagtgggaaaaagttaacaagatgtacaaggacagacagggcagatttgacaggtcagtggaaaaatggcggagatttcactatgacatcaagattttcaaccagtggctgactgaagcggaacagttcctgcgaaagactcagattcctgaaaactgggagcacgccaagtacaagtggtatttgaaagagctgcaggatggcatcggacaaagacaaaccgtggtgagaaccctgaacgccactggtgaggagattattcagcagtcctccaagactgatgccagcatcctgcaggagaagctcggatcactcaatttgcgctggcaggaagtgtgcaagcagctgtcagaccggaaaaagcgcctcgaagaaaccctcgagcgtctccaagagctgcaagaagcaaccgatgagctggatctgaaacttcgacaagctgaagtcatcaagggatcgtggcagccggtgggcgatcttctgatcgactcattgcaagatcatctcgaaaaggtgaaggccctccggggagagattgcgccactcaaggaaaacgtgtcccatgtgaacgatcttgctagacagcttactactctcggaatccagcttagcccctataatcttagcaccctggaggatctcaataccaggtggaagctgttgcaggtggccgtggaggaccgggtcaggcagctgcatgaggcacacagagattttgggccggcaagccagcatttcttgagcacttctgtgcagggaccttgggagcgcgcgatctccccaaacaaagtgccgtactacatcaaccacgaaacccagacgacttgctgggatcacccgaagatgaccgagctctaccagtcactggcggatctgaataacgtgcggttctcagcgtaccggaccgcaatgaagttgcggcgcctgcagaaggccctgtgcctggacctgttgtccttgtcggctgcctgcgatgccctggaccaacacaaccttaagcagaacgatcagccgatggatatactccaaatcattaactgcctgactactatctatgaccggctggagcaagagcacaataacctggtgaacgtgccgctttgtgtggacatgtgcttgaactggctgctgaacgtgtacgataccgggcggactggcagaatcagagtcctctcgtttaagaccggtatcatttcgttgtgtaaggcccatctcgaggacaagtaccgctacctgttcaaacaggtcgcctcctctactggtttttgcgatcagaggcgcctgggtctgctcctgcacgactcaatccagatccctcgacagcttggagaggtggcctcatttggaggcagcaatatcgaaccgtcagtccgcagctgcttccaattcgccaataacaagccggaaatcgaagccgccctgttcctcgattggatgcggctggaaccacagtccatggtgtggcttccggtgctccaccgggtcgcggccgcagaaaccgctaagcaccaggcgaagtgcaatatctgcaaggaatgtcctatcattggatttcgttaccgctccttgaagcatttcaactacgatatctgccagtcatgtttcttttccggccgcgtggcaaagggacataagatgcactacccgatggtggagtattgcaccccgactacttccggtgaggacgttcgcgatttcgcgaaggtgctcaagaacaaattccgcactaagcgctacttcgcaaaacacccgcgcatgggatacttgccagtccagaccgtgttggagggtgacaacatggagactgataccatg

SEQ ID NO: 251370 - DNA, 3432 bp, synthetic construct
  misc_feature 1..3432: note = Description of Artificial Sequence: Synthetic coding sequence
  source 1..3432: mol_type = other DNA
atgctgtggtgggaggaggtcgaggactgctatgagcgagaggatgtgcaaaaaaagactttcacaaaatgggtgaatgcccagttcagcaagttcggtaagcagcatatcgaaaatctgttctctgatcttcaggacgggcgtaggctccttgacctgctcgagggactgactgggcagaagctccccaaagaaaaagggagtacaagagttcatgcactgaataacgtgaacaaggcattaagagttcttcagaataacaatgtagacctggttaacatagggagcactgatatcgtggacggaaaccataagcttaccctcggactcatttggaacatcattctgcactggcaagttaaaaatgtgatgaagaatatcatggccggcctccagcagaccaacagcgaaaaaatcctgctgtcttgggtccgtcaatccactcggaactacccccaggtcaacgtcatcaacttcacaacatcttggagcgacggactggccttgaatgccctgatccactcgcacaggcccgacttattcgattggaattccgtggtttgtcagcaaagcgctacacagcgactggaacatgcttttaacatcgcccgctaccagctgggtattgaaaagctgctggaccctgaagatgtggatacaacctaccctgataaaaaaagtattcttatgtatatcacctccctgttccaagtactgccacaacaggttagcatcgaggcaatacaggaggttgaaatgttaccgcgccccccaaaagtgaccaaggaggaacacttccagctgcaccaccagatgcactactctcagcaaatcaccgtgtccctggcccagggctatgagagaacttcctcccccaaaccccggtttaaatcttatgcctacacccaggcggcctatgtgacgacttccgaccccacacggtctccgttcccaagccagcatctagaggctcccgaggacaagagttttggctcttccttaatggagagcgaagtgaatcttgaccggtaccagacagcactggaagaggtgcttagttggttactatccgccgaagacacattgcaagcccagggcgagatttctaacgacgtggaagtggtgaaagaccagtttcacacccatgaagggtacatgatggacctgacagcccaccaaggacgggttggcaacattctgcagctaggaagcaaacttataggcacagggaaactgtcggaagacgaggagactgaggtgcaggagcagatgaacctgttaaatagcaggtgggaatgtctcagagttgcgagcatggagaaacaatcaaacctgcacagggagattagttatgtacccagtacgtacctgactgaaatcacgcatgtatctcaggccctgctcgaagtagaacagctgcttaacgcaccggacctatgcgcgaaggattttgaagatttgttcaagcaagaggaaagccttaaaaatataaaggattctttgcaacagtcctccgggaggatcgacatcattcactcaaagaaaacggctgctctccagagcgctaccccggttgagagggttaagcttcaggaagccctgagccagcttgacttccagtgggagaaagtgaacaaaatgtataaggaccgacagggcaggttcgataggagcgtcgagaagtggcgccgcttccactatgatatcaaaattttcaaccaatggctgaccgaggctgagcagttcctgaggaagacacagattcctgaaaattgggagcacgccaagtacaagtggtacctgaaggaattacaggacgggatcggccaaagacagaccgttgtccgtacactaaacgcaactggcgaggagatcattcagcagtccagcaaaaccgacgcttccattctacaagagaaactaggcagcctcaacttaaggtggcaggaggtctgtaagcagctgtccgacagaaagaagaggctagaggagacgctcgagcgccttcaggaactacaagaagctactgacgaactggatctaaagcttcgccaggccgaggttatcaagggatcttggcagcccgtcggcgacctgttgatagactcactgcaggatcacctggaaaaggtgaaagctctacggggagagatagcccctctgaaagagaatgtgagccatgtcaatgatctggcaagacagctcaccactctgggaattcagctaagcccgtataacttgagtactctggaggatttgaatactcggtggaaattgctgcaagtcgccgtggaagacagggtgaggcaacttcacgaagcccatcgagacttcggcccagccagccagcattttctctctaccagtgtccaaggcccctgggagagagcgatctcacctaacaaggtgccctactacattaaccatgaaacacagaccacgtgttgggatcatccaaagatgacagaactgtaccaaagcctggccgacttgaacaatgtccgtttctctgcataccggaccgcaatgaagctaagacggcttcagaaggccctgtgtctggatctgctcagcttatcggccgcctgtgacgcactcgatcagcataatctcaagcagaacgaccagccaatggatattctccagataatcaactgtctcacaaccatttacgatcgactcgagcaggaacacaacaaccttgtaaacgtacctttatgcgttgacatgtgcctgaactggctcctgaacgtctacgatacaggacgcacaggcagaatcagagttctgtcctttaagaccggcattatttctctgtgcaaggctcacttagaagacaaataccgctatttgttcaagcaggtggcctccagcactgggttttgtgatcaacgaagattgggacttctgctccatgatagtattcagatcccaagacagttgggcgaggttgcttcatttggagggtctaatattgagccatcagtgagatcctgtttccaattcgctaacaacaaaccggagatcgaggcagcattatttctagattggatgcgtctcgaacctcagagtatggtctggttgcctgtcctgcatcgcgtggcggccgccgagacggctaaacaccaggcaaagtgcaatatttgcaaggagtgccccattattggcttccgctaccgttcattgaagcattttaactacgacatctgccagtcatgtttctttagtgggcgcgtcgccaagggacataagatgcattaccctatggtcgagtactgtaccccaaccacatcgggggaggatgtgcgcgattttgccaaggtgctcaaaaataaatttcgcactaaacgctatttcgcaaagcatccaagaatgggctatctcccagtgcagaccgtgctggagggcgataatatggagacagataccatg

SEQ ID NO: 251371 - DNA, 3432 bp, synthetic construct
  misc_feature 1..3432: note = Description of Artificial Sequence: Synthetic coding sequence
  source 1..3432: mol_type = other DNA
atgctgtggtgggaggaagtcgaagactgttacgagcgcgaggacgttcaaaagaaaacgtttaccaagtgggtcaacgcacagttttccaagttcgggaagcagcatatcgagaacttgttcagcgacttacaagatggtagacgcttactggatctactcgagggtctgaccgggcagaaactgcctaaggagaagggaagcacaagagtccacgcgctaaataatgtcaataaggctcttcgggtcctccaaaataacaacgtggacctggtcaatatcggctccaccgatatcgtggacggaaaccacaagctcacgttgggccttatttggaacatcatcttacactggcaggtgaagaacgtgatgaagaatataatggccggtcttcagcagaccaatagcgaaaaaatcctcctgtcctgggtaaggcagagcacacgaaactacccccaagtaaatgttattaatttcacgacctcctggtcggacgggctcgccctgaacgccctgatccactcacacaggcccgatctgttcgactggaactccgtggtatgtcagcagagtgcgacacagagattagagcatgctttcaacatcgcccggtaccagcttggaatcgagaagctcttagatcccgaggacgtggacaccacttatcccgacaagaaatccattttgatgtacatcacttcacttttccaggtgctgccacaacaagtcagcattgaagcaatccaggaagtcgaaatgctaccaagaccacccaaggttactaaggaggagcacttccagctccaccaccagatgcactattcgcaacagatcacagtcagtttggctcagggctacgagcgaacctcttcgcccaaaccaaggtttaaatcctacgcctatactcaggcagcatacgtgactacatcagaccccacccggagtcctttccctagccagcatctggaggcccctgaggataagtcttttggcagttccctgatggaatccgaagtgaatcttgacaggtaccagaccgccctggaggaggtcctgtcttggctcttgagcgctgaggataccctacaagcccagggggagatatccaatgatgtggaggttgtcaaggaccagtttcatacccatgaggggtatatgatggatctgaccgctcaccaaggacgggtgggtaacatactgcaactggggtctaaactcattggtaccggcaagttgagtgaggatgaggaaactgaagttcaggaacagatgaatctgttgaattctcgctgggagtgcctgcgcgtagccagtatggagaagcaaagcaatttgcatagggagatctcttatgtcccatcgacctatctgactgaaattactcacgtttctcaggcgctcctggaggtggagcagctgcttaacgcacccgatctgtgtgcaaaagattttgaagacctttttaagcaggaggaaagtctgaagaatattaaagatagtctgcaacagagctctgggaggatcgacataatccactctaaaaagaccgctgctctgcagagcgcgactccggtagaacgtgttaagcttcaggaggctctatcacagttggactttcaatgggagaaagtgaataagatgtataaggatcgccaaggccggttcgaccggtctgtggaaaaatggcgaagatttcactacgatatcaaaattttcaaccagtggctaacggaagctgagcagtttctgagaaagacacagataccagagaactgggagcatgccaagtataaatggtacttgaaggagctgcaagacgggattggccagcgccaaaccgtcgtccggacactgaatgcaaccggcgaggaaataatccagcagtccagcaagaccgacgctagcatacttcaagaaaaattggggtccctgaacttgcgctggcaggaggtatgcaaacaattgtcagatagaaagaaacgccttgaagaaaccctggagcgcctgcaggagctgcaggaggcaactgatgaactcgacttgaagctccggcaagctgaggtgatcaagggatcttggcagcccgttggcgacctcctgattgattccctgcaggatcacctcgagaaggtgaaggcactgaggggcgagatagcaccactcaaggagaacgtcagccacgtgaacgatctagccaggcagttgactacacttggcattcagctgtctccttacaatctctcaaccctggaggatctgaatacacggtggaagttgctccaggtcgcggtcgaggatcgggtacggcagctacatgaggctcacagagactttggccctgcctctcaacacttcctgagcacctccgttcagggaccttgggagcgagcgatctcccccaacaaagtgccgtactacattaaccacgaaactcaaacaacatgctgggaccaccctaagatgaccgagctatatcagtcccttgccgatctcaacaatgtccgcttctctgcataccgcactgccatgaagctcagaagactccagaaggccctgtgcttggacctgcttagcctaagcgcagcttgcgatgccctcgatcagcataatctgaaacaaaacgatcagcccatggatatccttcagattatcaactgcctcacaacaatctacgatcgccttgaacaagaacacaataatctcgtgaacgtgccgttatgtgtagacatgtgtctcaactggctgctcaatgtgtacgacaccggccggacaggcagaataagggtgcttagcttcaaaacaggtattatatcgctttgtaaggctcacttggaagataaataccgctatctgtttaaacaggtcgcatcaagtaccggattctgtgaccagcgcagattgggactactgttgcatgatagtatccagattccacggcagctgggcgaagtggcctcctttggaggttcaaacatagagccgtctgtccgatcctgcttccagttcgccaataataaaccagagattgaagccgctctcttcctggattggatgaggctggaacctcagagtatggtgtggcttccagtactgcaccgggtggccgctgctgaaaccgcaaagcatcaagccaaatgcaacatctgcaaagagtgtcctatcatcgggttccgctataggtcattgaagcacttcaactatgacatctgtcagagttgtttcttctctggcagggtagccaaaggccacaaaatgcactatcccatggtggaatactgtacccctactacatctggggaggacgtgagagacttcgccaaggtcttgaagaataagtttagaacaaagcgatacttcgctaagcaccctcgtatgggataccttcccgtgcagactgtattggagggggataatatggaaaccgataccatg

SEQ ID NO: 251372 - DNA, 3432 bp, synthetic construct
  misc_feature 1..3432: note = Description of Artificial Sequence: Synthetic coding sequence
  source 1..3432: mol_type = other DNA
atgctctggtgggaagaagtggaagattgctatgagcgggaggacgtgcagaagaaaactttcaccaagtgggtcaacgcgcagttctctaagttcggaaagcaacacattgaaaatctgttctctgacctccaagacggaagaaggctgttggacctgctggaaggactcaccggacaaaagctgccgaaagagaaaggatcaacccgcgtgcacgcacttaacaatgtgaacaaagccctgagagtgctgcaaaacaacaacgtggacctcgtcaacattggatccactgacatcgtggatggcaatcacaagctgacgctcggtttgatctggaacattatcctgcactggcaggtgaagaacgtcatgaagaacattatggccggacttcaacagacgaattcggagaaaatcctcttgagctgggtccggcaatccacccgcaattacccacaggtgaacgtcatcaactttactaccagctggtccgacggactcgcgcttaatgctctgatccacagccataggccggatctgttcgattggaactccgtggtgtgccaacagtcggccactcaacggcttgagcacgccttcaacattgcgcggtaccagcttggaatcgagaaactcctggatccagaggacgtagacacgacctaccccgataagaagtcgatcctgatgtacattaccagcctgtttcaggtgctgccacaacaggtcagcatagaagcgattcaagaagtcgaaatgctcccgcgcccgccgaaagtcactaaggaggagcattttcagcttcatcatcaaatgcactattcccaacaaataactgtgtctctcgcgcagggatacgaaaggacttcgtcgccaaaacctagattcaaatcatacgcatacactcaggccgcctatgtgactactagtgaccctacccgctcgccattccccagccagcatctggaagccccggaggataagtcgttcggtagctctttgatggaatcggaagtgaacctggacagataccagacggccctggaggaggtgctgagctggcttctgagcgccgaagatacgctgcaggcacagggtgaaatctccaacgacgtggaggtcgtgaaggatcagttccacacgcatgaaggatacatgatggatctgactgcacaccaagggcgcgtgggcaatatcctgcagctcggatcgaagctgatcggaactggaaagctgtccgaagatgaggaaactgaagtccaggaacagatgaatctgctgaattcccgctgggagtgcctgcgtgtggcaagcatggaaaagcagtccaatctgcatcgcgaaatctcctacgtcccgtcaacctacctcactgaaatcactcacgtgtcacaggctctgttggaagtggaacagcttctgaacgcgccagatctgtgtgcaaaggactttgaggacctgtttaagcaggaagagtcactcaagaacatcaaagacagcctgcaacagtcctccggccggatcgacattattcattcgaagaaaaccgcggcccttcagtccgctactccggtcgagcgggtgaaacttcaggaggcactgagccagttggacttccaatgggagaaggtcaataagatgtacaaagataggcagggaaggttcgaccggagcgtggagaagtggagacgcttccactacgacattaagatctttaaccaatggctgacggaggctgaacagtttctgcgaaagactcaaattccagaaaactgggaacatgcgaagtacaagtggtaccttaaagaactccaggacggaatcggccagagacagaccgtcgtccgcaccctgaacgctaccggcgaagaaatcatccagcagtcctcgaaaaccgatgcgtccattctgcaggagaaactcggatccctgaatcttcgctggcaggaagtgtgcaaacagctgagcgaccggaagaagcggctcgaagaaacccttgagcgcctccaagaactgcaggaggcaactgacgaactggacctcaagttgcggcaggccgaggtcatcaaggggtcttggcagccggtcggcgacctgttgatcgattcactgcaggaccacttggagaaggtgaaggccctgcgcggcgaaatcgccccactcaaggaaaacgtgtcacatgtgaatgatctggctcggcaactgaccactttgggaatccagctgtcgccctacaatctgtcaacgctggaggacctgaatacccgctggaagttgctccaagtcgcagtcgaggaccgcgtgcgccaactccacgaagctcatagggattttggacctgcgagccagcatttcctctcaaccagcgtgcaagggccatgggagcgggcgatttccccgaacaaggtcccgtactacatcaatcacgaaacccagaccacctgttgggaccacccaaaaatgactgagctctaccagtcactggccgacttgaataacgtccgcttttcagcttaccgcaccgccatgaagctccgccgcctgcaaaaggccctttgcctggatctgcttagcctctccgcagcctgcgatgcgctcgatcagcacaacctgaaacagaacgatcaacccatggacatactgcaaatcatcaattgtcttactaccatctacgatcgactcgaacaggaacacaataacctggtgaatgttcccctgtgtgttgacatgtgcctgaactggctgctgaacgtgtatgacactgggcggaccggcagaatccgcgtcctctcctttaagactggaatcatctcactctgcaaggcgcacctggaagataagtaccgctacctctttaagcaagttgcgagctctaccggattctgtgaccaaaggagactgggactgctgctgcacgacagcatccagattccacgccagctcggagaagtggcctccttcggaggatcaaatatcgagccctccgtgcgctcttgcttccagttcgccaacaataagccggaaatcgaggcggcgcttttcctcgattggatgcgccttgagccgcaatccatggtgtggctcccggtgctgcatagagtggctgccgcggagactgccaaacatcaagcaaagtgtaacatctgcaaggaatgtccaatcatcggatttagataccgctcactcaaacactttaactatgacatctgccaaagctgctttttcagcggccgggtcgcgaagggacacaaaatgcattacccaatggtggagtactgcactcctaccacgtccggcgaggatgtgcgcgatttcgcaaaggtgttgaagaacaagtttagaactaaacggtacttcgccaaacatccacgcatgggttacctcccagtgcagactgtgcttgagggggacaatatggaaaccgacactatg

SEQ ID NO: 251373 - DNA, 3432 bp, synthetic construct
  misc_feature 1..3432: note = Description of Artificial Sequence: Synthetic coding sequence
  source 1..3432: mol_type = other DNA
atgctgtggtgggaagaagttgaggattgctacgaacgcgaggacgtgcagaagaaaacctttaccaagtgggtgaatgcgcaattttcgaagtttggaaaacagcatatcgaaaacctcttcagcgacctgcaggacggacggcggctgttggacctgctcgaagggctgactgggcagaaactccctaaggagaagggctcgacccgggtgcatgcactcaataatgtgaacaaggctctcagagttctccaaaacaataatgtcgaccttgtgaacatcggttctactgatatcgtggatggcaaccataagttgaccctgggactcatctggaacatcattctgcactggcaggtgaaaaacgtgatgaagaacatcatggctggccttcagcaaaccaacagcgagaagatacttctcagctgggtgcgccagtccacccgcaattacccacaggtgaatgtcatcaatttcaccacctcctggtcagatggactggcacttaatgccctcatccatagccatcgcccagatctgtttgattggaactctgtggtgtgccaacagtccgccactcagagattggaacacgcattcaacatcgcacggtaccagcttggcatcgaaaaactcctggacccggaggatgtcgatactacctaccccgataagaagagcattttgatgtatatcacttccctcttccaggttctgcctcaacaagtctccatcgaagccatacaggaagtggagatgctgccacggccaccgaaggtcaccaaggaggaacatttccagctgcaccaccaaatgcattactcccaacaaatcactgtgtctctggcccaaggatacgagagaactagcagccctaaacctcgcttcaaatcatacgcatatacccaggccgcatacgtcactacctcggacccgactagatctcctttcccttcacagcacctggaggccccggaagataagtcgttcggaagcagcctcatggagagcgaagtgaacctggacaggtaccagacggcactggaggaggtcctgtcgtggctgctctccgccgaggacaccctgcaggcccagggagagatttcaaacgatgtagaagtcgtgaaggatcagtttcacacccatgaaggatacatgatggatctgacggcccaccagggccgagtgggaaacatactgcaattggggtccaagctcatcggaaccggtaaactttctgaggacgaagaaaccgaggttcaagagcagatgaacctgctgaattcgaggtgggagtgcctgcgggtggcctcaatggagaaacaatcgaaccttcacagagagatctcgtacgtgccgtcgacgtacctgaccgaaatcactcatgtgagccaggcactgctggaagtggaacaactcctgaatgcaccggacctgtgcgcaaaggactttgaggacctgttcaagcaggaagaatcactgaagaatatcaaagacagcctgcagcagtcatcgggacgcatcgacatcatccattccaaaaagacggctgccctgcagagcgccactcccgtggaacgggtgaaactgcaggaagccctctcacaactggactttcagtgggagaaagtcaataagatgtacaaggaccgccagggacggttcgaccgatcagtcgaaaagtggcggcgcttccattacgacattaagatctttaaccagtggcttaccgaagcggagcagtttttgcgtaaaacccaaattccggagaattgggagcacgcaaaatacaagtggtacctgaaagaattgcaagacggaattggacagcgccagacggtcgtccgcaccctgaatgccaccggtgaagagatcattcagcaatcatccaagaccgacgcctcaatcctccaagaaaagctggggagcctgaacctgcgctggcaggaagtgtgcaagcagctcagcgatagaaaaaagagacttgaagaaactttggagcgcttgcaggagctccaagaggccaccgatgaactcgacctgaaactgcggcaggcggaggtgataaagggctcctggcagccggtgggagatctgcttatcgactccctgcaagatcacttggaaaaggtcaaggcgctgcgcggggaaatcgctccgctcaaggaaaacgtgtcccatgtcaatgatctggcacgccagctgactactttgggaatccagctctcaccttacaacctgtccaccctggaggacctcaacactagatggaagctccttcaggtggctgtggaggatagagtgagacagctgcacgaggcacaccgggacttcggaccggcttcgcaacacttcttgtccacctcggtgcaaggcccttgggaaagggccatctcaccgaataaggtgccgtattacatcaaccatgaaacgcagactacttgctgggatcatccgaagatgactgaactgtaccagagcctggctgacctcaataacgtccgcttctcagcgtaccggacggctatgaagctgagacggctgcaaaaagctctctgtctcgacttgctgagtctctcagctgcgtgcgacgccttggaccaacacaacctgaaacaaaacgaccagccgatggacattctgcaaatcatcaactgtctcaccaccatctacgaccgcctggaacaagaacacaacaacctggtcaacgtgccgctgtgcgtcgacatgtgtttgaactggctgctgaatgtgtacgataccgggcgcaccggacgaatccgcgtgctctcattcaagaccggcatcatctcactttgcaaagcgcatttggaggacaaataccgctacttgttcaaacaggtggcctcaagtaccggattttgcgaccagaggcggctgggattgctcctgcacgactccattcaaatcccgagacagctgggagaggtggcctcgttcggaggatcgaatattgagcctagcgtgagatcgtgcttccagttcgcaaacaacaagccggaaatcgaggccgctttgttcttggattggatgagacttgaaccacagagcatggtgtggctcccggtactccaccgcgtggccgctgctgagactgctaaacatcaggccaagtgtaacatttgcaaggagtgtcctatcataggtttccggtacaggtcgctcaaacactttaactatgatatctgccaatcgtgctttttctcaggtcgggtggcaaaaggccacaagatgcactacccaatggtggagtattgcaccccaaccacttcgggagaggatgtgcgcgacttcgcaaaagtgttgaagaacaagttccgcaccaagaggtacttcgcgaagcacccaagaatgggctacctgcctgtgcagacggtgctggagggcgacaatatggaaaccgatactatg

SEQ ID NO: 251374 - DNA, 3432 bp, synthetic construct
  misc_feature 1..3432: note = Description of Artificial Sequence: Synthetic coding sequence
  source 1..3432: mol_type = other DNA
atgctgtggtgggaagaggtcgaggattgctacgagcgagaagatgttcagaaaaagacattcactaaatgggtcaacgctcagttttctaaattcggtaaacagcacatcgaaaatctgttcagcgaccttcaggacggtaggcgtctgctggatctgctcgaaggattgaccggtcagaaactacctaaagagaagggaagtacacgggtgcatgcactgaacaatgtcaacaaggcgctgagagtcctgcagaacaataatgtcgatttggtgaacataggttctacagacatcgtggacggcaaccacaagctcactttaggcctgatatggaatatcatcttgcactggcaggtgaaaaacgttatgaaaaacattatggctggcctacagcagacaaactcagaaaagattcttctgtcatgggtgcgacaaagcacgcgtaactaccctcaggtcaacgtgatcaacttcactacatcctggagtgacggacttgctttgaatgccttaatccattctcaccgacctgacctcttcgactggaactccgtggtgtgccagcagtcggccacccagagattggaacatgcatttaacatcgcaagataccagctgggtatagagaaacttctggaccccgaagacgtggatactacgtaccccgacaagaaatcaatcctgatgtatattacgagtttattccaggtgcttccccaacaagtgtcaattgaagcaattcaagaagtcgagatgctacctagacctcccaaagtgacaaaagaggaacattttcaactccaccatcagatgcattatagtcagcaaatcacagtgagtctcgctcaagggtacgaaagaacttctagtcctaagccgaggtttaaatcatatgcttatactcaagcagcctatgtgaccacgagtgatccgacccgatctcccttcccatcacaacacttagaagctccggaagacaagtccttcggatccagcctgatggaaagcgaggtcaatctggataggtatcagacagcacttgaagaggtactctcgtggttactgtccgctgaagatactctgcaggcgcagggggagataagtaatgacgttgaggttgtgaaggaccagtttcacactcatgagggctatatgatggatctgacagcccatcagggcagagtgggcaatatacttcagttagggtccaaactgatagggaccggtaagcttagcgaggatgaggagactgaagtccaggaacagatgaatctgcttaacagccgatgggaatgcctgagggtcgccagcatggaaaagcagagtaacttgcatcgagagatcagctatgttcctagcacttatctaaccgaaataactcatgtctctcaggcactactcgaagtagagcagcttttaaacgctccagatctctgcgctaaagacttcgaagatttgttcaagcaggaagagtcccttaagaacatcaaagactccctccagcagtcaagcggccgaatagacattatccactcaaagaaaacagcagccctccagtctgccaccccagtggagcgggtaaaactacaggaggctttgtctcagttagacttccagtgggagaaggtaaataagatgtacaaagataggcagggcaggttcgatagatcagtcgaaaagtggaggaggtttcactacgatattaagatatttaatcagtggcttaccgaagccgaacagttcctccgaaagacacagattccagaaaattgggaacatgcgaagtacaagtggtacctgaaggagctacaggacggtatcggccagaggcagaccgtggttcgaactctgaatgctactggggaagaaataattcaacaatccagcaagacggacgcaagcatactacaggagaaactcgggagccttaatctgagatggcaggaagtctgcaagcagctctcggataggaaaaaacgacttgaggaaaccttggagcgccttcaggagctccaggaggctactgacgaactcgacctgaaactgaggcaggccgaggtcattaagggatcttggcagccagtgggggacctcctgatagatagcctgcaggatcacctggagaaagtaaaagccctgcgtggcgaaattgccccacttaaggagaacgtctcacacgtgaatgatctggcaagacagctgactactctgggcatccagctgagcccgtataacctgagcacattagaggacttaaataccaggtggaaactcttacaggtggctgttgaggaccgagtacgacagctccacgaggcccatagggacttcggtccagcttcccaacattttctgagtacgtccgtccaggggccctgggaaagggcaatcagccccaacaaggtgccttactacatcaatcacgaaacccaaacaacctgctgggatcatcccaagatgactgagctataccagtccctggctgatctgaataatgtgaggttttcggcttatcgaactgccatgaagctcaggcggcttcaaaaggctctatgtctggatctgctatctctaagcgccgcctgtgacgcgctcgaccaacacaatctgaagcagaatgaccagcctatggacatcctgcagatcattaattgcctcacgactatctatgacagactggaacaagagcacaataacttggttaatgttcccttgtgtgtggacatgtgtttgaactggctgctgaacgtttacgatactggaaggacaggcaggattagggtgctgtctttcaagactgggataatctctctatgcaaagcgcatctcgaggataagtacaggtacctgttcaagcaagtcgcgagcagcacaggcttctgtgaccaacgaagactgggtctcctcctccatgactctatccagattccacgacagctcggcgaggtggcttcgtttggcgggtctaacatagagccctctgtcagatcttgtttccagtttgcaaataataaacctgagattgaagcggccctgtttctcgactggatgcggcttgagccacagtccatggtttggctccccgtgttacaccgtgtggccgcagcggagacagccaagcaccaggcaaaatgcaatatctgcaaagagtgccctataatcggcttccgttacaggtcactaaagcactttaattacgatatctgtcagagttgcttttttagtgggcgggtcgccaagggacacaaaatgcattaccccatggtggaatactgtacccctacgactagtggggaggacgttcgagacttcgcaaaggttctgaagaacaaatttaggactaaaagatattttgctaagcatccccgcatgggttaccttccggttcagaccgtattggaaggcgataacatggaaacagatacaatg

SEQ ID NO: 251375 - DNA, 3432 bp, synthetic construct
  misc_feature 1..3432: note = Description of Artificial Sequence: Synthetic coding sequence
  source 1..3432: mol_type = other DNA
atgctctggtgggaggaagttgaggattgttacgaaagggaagatgttcagaagaaaacgttcaccaagtgggtgaacgcccaattcagcaaatttggaaagcagcatattgagaatctgtttagcgatctgcaggatggacgcagacttcttgaccttcttgaaggcctcactggccaaaaacttccaaaagaaaaggggtcgactagggtgcatgcacttaacaacgtcaacaaggcgctccgggtgctccagaataacaacgtggacctggtgaacattggctccaccgatatcgtggatggaaatcacaaattgactcttggtctgatttggaacattatcctgcattggcaagtgaaaaacgtgatgaaaaacataatggcaggtctgcaacagactaactcggaaaagattttgctttcttgggtgcgccaatccacccgaaactacccccaagtgaatgtcataaacttcaccacttcctggtcggatggcttggcattgaatgcccttattcatagccatagacctgatctctttgattggaactcggtcgtgtgtcagcagtcagccactcaacgactcgaacatgcgttcaacatcgctcgttaccagcttgggatcgagaagctgctggatccagaagatgtggacactacctacccagataagaaatcaatccttatgtatatcacctcactgtttcaagtgctgccacagcaggtcagtatagaagcaattcaagaagtggagatgcttcctagaccccccaaggtcactaaagaggaacactttcagctgcatcaccagatgcactactcccagcagatcaccgtctcactcgcccagggttatgagcgcacctctagtcctaaaccaaggtttaagagctacgcctacactcaggcagcatacgtgaccacctcagaccccacgcgttcgccttttccctcacagcatcttgaagcccctgaagataagtcgtttggatcatccctcatggaatcggaagtgaatctggaccggtaccaaaccgcgctcgaagaagtcctgtcctggttgctgtcggcagaggacaccctgcaagcccagggcgaaatcagcaacgatgtggaggtcgtcaaggaccagtttcatactcatgaagggtacatgatggacctcacggcacaccagggtcgggtgggaaatatcctgcagctggggtccaagctgatcggaaccgggaaactctcagaagatgaagagactgaagtgcaggagcaaatgaatctgctgaactctaggtgggagtgtctgagagtcgcctcgatggagaagcaatccaacctgcacagagagatatcctacgtgccaagcacctacctgacggaaattactcacgtgtcgcaggcactgctggaagtggaacaactgctgaacgcaccggatctgtgtgctaaagacttcgaggatcttttcaagcaagaggaatcgctgaaaaacattaaagattccctgcagcaatcttctggccgcatagacatcatccacagtaagaaaactgcggcacttcagtccgcaactccggtggagagggtcaagctccaggaagccctctcgcaacttgattttcagtgggagaaggtcaataagatgtataaggataggcaaggtagatttgatcgttcagtggaaaagtggagaagatttcattatgacatcaagatattcaaccagtggctcaccgaagcagagcaatttctgcgaaagactcagattcccgagaactgggagcatgccaagtacaagtggtacctgaaggaactgcaagatggtattgggcaaagacaaaccgtcgttcgcactctgaatgccactggggaggagatcattcaacaatcctcgaaaaccgacgcttctattcttcaagaaaagctgggatcgcttaatctgaggtggcaagaagtgtgtaagcagctttcggatagaaagaagagacttgaggagactctcgaaagattgcaagaacttcaggaagccaccgatgagctggacctcaagctgcgtcaagctgaggtcataaagggaagctggcaaccagtcggagatttgctcattgacagcctgcaagaccatctggaaaaagtcaaagcccttcggggcgaaatcgcaccacttaaggaaaacgtctctcacgtgaatgatttggctcgccaactgacgacgcttggtatccagctctccccctacaacctttcaaccctggaagatcttaacactagatggaaacttctccaagtggcggtcgaagatcgcgtgcgtcagctgcatgaggcacatagggatttcggaccagcctcgcagcatttccttagcaccagcgtgcaaggtccttgggagcgcgcaattagccccaacaaagtaccctactacattaatcatgaaactcagactacgtgttgggatcatcctaagatgactgaactgtaccaatccctcgccgatctgaacaacgtccggttcagcgcctacaggaccgcgatgaagttgagacggctccagaaggcactttgtcttgatcttctcagcctttcggcagcatgcgacgctcttgatcagcataatcttaaacaaaatgaccaaccaatggatatcctccagattatcaattgccttactacgatttatgaccggcttgaacaagaacataacaatctcgtcaacgttccactgtgcgtcgatatgtgcttgaactggctccttaacgtgtacgacactggaagaacgggaagaattagagtcttgagctttaagaccggaattatcagcctctgcaaagcgcacctggaggacaagtaccgctacttgtttaagcaagtggcatcatcaaccggattttgtgaccagcggaggcttggactcttgctccacgattccattcaaatcccaaggcagcttggagaagtcgcctcatttggaggatccaatattgaaccttcggtcagatcgtgcttccaatttgcaaacaacaagcccgaaattgaggccgccctgtttcttgactggatgagactggagccacagtctatggtgtggctcccagtgctccatagagtcgcagcagcggaaaccgcaaagcatcaggcaaagtgtaacatttgtaaggagtgtccgataataggattccgctacaggtcccttaagcacttcaattacgacatttgtcagtcgtgctttttctctgggagagtggccaaaggacataagatgcattaccctatggtcgaatactgcactcctaccacttcaggagaagatgtgcgtgatttcgcgaaggtgcttaagaataagttcaggaccaagaggtactttgctaagcaccctagaatgggatacctccctgtgcagaccgtgcttgagggggacaacatggaaaccgacaccatg

SEQ ID NO: 251376 - DNA, 3432 bp, synthetic construct
  misc_feature 1..3432: note = Description of Artificial Sequence: Synthetic coding sequence
  source 1..3432: mol_type = other DNA
atgctctggtgggaggaggttgaggactgctacgagcgcgaagatgtgcagaaaaagacatttactaaatgggtgaacgcccaatttagcaaattcggaaaacagcacatcgaaaatctatttagtgacctccaggacggaagaaggcttcttgacctcttagagggccttaccggccagaaattaccgaaggagaaaggcagcaccagagtgcatgccctaaataatgtgaacaaggccctgcgcgtgctgcagaataataatgtggatctggttaatatagggtctactgacattgtggatggcaaccacaaactgacattgggactgatctggaatataatcttgcactggcaggtgaagaatgtgatgaagaatattatggccggcctgcagcaaaccaattctgaaaaaattctgctctcttgggtgcgccaaagcaccaggaactacccacaggtcaacgttattaacttcactacttcttggagtgatgggctcgcattgaatgccctgatccattcacatagacctgatctttttgactggaactcagtggtgtgtcaacagagtgctacccagcgtcttgaacatgcgttcaacattgccagatatcagctaggcatcgagaagctgctggatccggaggatgtcgatacaacttaccccgacaagaagtctatcctcatgtacattacgtcgttgtttcaggtgctacctcaacaggtgagcattgaggctattcaggaagtggagatgctgcccaggccgcccaaagtaacaaaagaggagcactttcaactccaccaccagatgcactactcccagcagattacagtgtccctggctcagggctacgaacgaacgtcaagtcctaagcccagatttaagtcttatgcatatacccaagccgcttatgtgacaacgtccgacccgacccgctctccatttccctctcagcacctggaggcaccagaggacaaaagctttggtagcagtctcatggagtcggaggttaatctggaccggtatcagacagctctggaggaagtattgagctggctactaagcgccgaagacacgctccaggctcagggcgaaatctcgaatgatgttgaggtcgtgaaggatcagttccatacccacgaggggtatatgatggatctcacagcccatcagggccgtgtgggtaatatcctccagctcggcagcaaactcattgggacaggtaaactctccgaagacgaggaaaccgaagtacaggagcagatgaatctcttgaactcccggtgggaatgtctgcgcgtggcttctatggagaagcagagcaatctgcatagagaaatctcctacgtcccaagcacatatctcactgaaatcacacacgtctcccaggccctgttggaagtggaacagctgctgaacgcgcccgatttgtgcgccaaagacttcgaagacctgttcaagcaggaagaaagtctgaaaaacattaaggactctctgcagcagagttctggacggatcgatataattcacagtaaaaaaactgcagctctccagtccgccaccccagttgagcgagtgaagctgcaggaagctctcagccaactggacttccaatgggaaaaggtgaacaagatgtataaggatagacagggacgattcgatcggtccgtcgagaaatggcgccgattccactatgacattaaaattttcaatcaatggctaaccgaggcagagcagttccttaggaagacccagatccccgagaactgggaacatgctaagtacaagtggtacctcaaggagctccaggatgggatcggacagcgacagactgtggtacgcaccttaaacgctactggggaggagatcattcaacagagttccaagaccgacgctagcatcctacaggaaaaactgggctctctgaacctgcggtggcaagaagtgtgtaagcaactgagcgacaggaagaagcggctggaggaaactttagagagactgcaggagctgcaggaggcgaccgatgaattggatctcaagctgcggcaggcggaagtgattaagggatcttggcagcccgttggcgacctgctgatcgactctctgcaagatcacctggagaaagtgaaggctctccgaggtgagattgcgcccctgaaggagaatgtttcacacgttaatgacctggccaggcagttgacaacgctaggcatacagttgtccccctataatttgagtaccctggaagatctaaacacacggtggaagctgctgcaggttgcagtggaagatagagtacggcagcttcacgaagcccatagagattttggcccggcttcccagcatttcctgtctacaagcgtgcagggtccctgggagcgtgccatcagtccaaacaaggtgccttattatataaaccatgagacccaaaccacctgctgggaccatcctaaaatgactgaactgtaccagagtttggccgacctgaacaatgtgagattcagtgcctacagaaccgccatgaagctccggcggcttcagaaagccctttgtctggacctccttagcctgagtgctgcatgtgacgcactggatcagcacaacttgaaacagaatgatcagcccatggacattcttcagataataaactgtctcacgacaatttacgatagactggagcaggagcataataacttggtgaacgtgcctttatgtgttgacatgtgcctgaattggttgctgaatgtgtatgacactggccgcaccggcagaatcagggtgctgtcattcaagacgggaattatctccctatgtaaggcccatcttgaggataaatatcggtaccttttcaaacaggtcgcatcatccacaggtttttgcgatcaaagacgactgggcctgttactacacgatagtattcagataccgaggcagctgggagaagtagcgtctttcggagggagcaatatcgagcctagcgtccgcagttgtttccagtttgccaacaacaagcccgaaatcgaggccgccctgttcttggactggatgcgcttggaaccccagtcaatggtctggctgccagtgttgcatcgtgtcgctgcagctgagactgccaagcatcaggcgaagtgcaatatttgtaaggagtgtcctatcatcgggtttaggtaccgatctttaaaacactttaattatgatatctgtcagtcttgctttttctcgggtcgggtggcgaagggccacaagatgcactatcccatggtcgagtattgcacaccaaccacctccggggaggacgtcagagattttgctaaggtcctgaaaaataagttccgcaccaagagatactttgctaagcacccccgaatgggctacctgccggtacagaccgtgctcgagggtgacaatatggagactgacaccatg

SEQ ID NO: 251377 - DNA, 3432 bp, synthetic construct
  misc_feature 1..3432: note = Description of Artificial Sequence: Synthetic coding sequence
  source 1..3432: mol_type = other DNA
atgctctggtgggaagaagtggaagattgttacgaacgggaagatgtccagaaaaagacgtttactaaatgggtcaacgcacagttttcgaagttcggaaagcagcacatcgagaacctgttctccgatctgcaagacggccggagactgctggacctgctggaaggactgactgggcagaaactgccaaaggaaaagggatccacccgggtgcacgcgctgaataacgtcaataaggctcttcgcgtgctgcagaacaacaacgtggacctcgtgaacatcggatcgaccgacatcgttgacggaaatcacaagctcacgcttggccttatctggaatatcattctgcactggcaggtgaaaaatgtcatgaaaaacatcatggctggccttcagcagaccaattccgagaagattttgctctcctgggtccggcaatcgacccgcaattaccctcaagttaatgttatcaatttcaccacctcgtggtcagacggactggcactgaacgccctgattcacagccaccgcccggatctgttcgactggaactcagtcgtgtgccaacagtcagcgacccagcgcctggaacatgcgttcaacatcgcccgttaccaactgggaatcgaaaagctgctggacccagaggatgtcgacactacctacccagacaaaaagagcatcttgatgtacataacttccttgttccaggtcttgccccaacaggtgagcatcgaggccatccaagaggtggaaatgttgcccagaccaccgaaggtgactaaggaagagcattttcagctgcatcatcaaatgcattactcgcagcaaattacggtgtcactggctcagggatatgagcgcacttcctcgcctaagccaagattcaaatcctacgcgtacacccaggcggcttacgtcacgaccagcgaccccacccggtccccgttcccgtctcagcatctcgaagccccggaggacaaatccttcgggagctcacttatggagtccgaggtgaacctcgacagatatcagactgcgctggaggaggtgttgtcgtggctcctgtcagctgaggacacgctgcaagcacaaggcgagatttcaaatgatgtggaggtcgtgaaggaccaattccatactcatgagggatatatgatggatttgaccgcccaccaaggaagggtggggaatatcctgcaattgggctccaagctcatcggaactggtaagctctcagaggatgaagagactgaagttcaagaacagatgaacctgctgaacagccggtgggaatgccttcgagtggcctcaatggaaaagcaaagcaacctgcatagagaaatttcatacgtcccgtcaacctacctcactgaaatcactcatgtgtcccaggcattgctcgaggtggaacagctgctgaacgcgccagatctgtgcgccaaagacttcgaagatctgttcaaacaggaagagtcgttgaagaatatcaaagactcacttcaacagtcgagcgggagaatcgatatcatccactcgaagaaaaccgccgccctgcagtctgcgactccggttgagcgagtgaagctgcaagaagctctctcgcagcttgacttccaatgggaaaaggtgaacaagatgtacaaggaccggcagggacgcttcgatagatcagttgaaaaatggcggcggttccactacgacatcaaaatctttaaccagtggctcactgaagctgaacagtttctgcggaaaacccaaatcccggaaaactgggagcatgcgaagtacaagtggtatctgaaagaactgcaggatggaatcggtcaaaggcaaaccgtggtccgcactttgaatgccactggcgaagagatcatccaacagtccagcaagactgatgccagcatattgcaggaaaagctcggaagcctcaaccttcgctggcaggaagtgtgcaaacagttgtctgatcggaagaagcgcctcgaggagacgcttgaacggttgcaagagctgcaggaagccacggatgagctcgatctcaagttgagacaggccgaagtgatcaaaggcagctggcaacccgtcggcgatctgcttatcgacagccttcaagaccacttggaaaaggttaaggccctcagaggggaaatcgcaccactcaaggaaaacgtgtcacacgtgaacgacctggcgagacagctgaccactctcggaatccaactctcaccgtacaatctgtccacgctggaggacctgaacacccgctggaagctgctccaggtggctgtggaagatcgggtgaggcagctgcacgaagcacaccgcgattttggacctgcctcgcagcacttcctgtcgactagcgtgcagggaccgtgggagcgggctatctcaccgaacaaggtgccgtactatatcaaccatgaaacgcagaccacctgctgggatcatccgaaaatgacggaactgtaccaatcacttgctgatctgaacaacgtgagattcagcgcataccgcactgcgatgaagctgaggcggctgcaaaaggccctttgtctggatctccttagcctgtccgccgcgtgcgacgccctcgaccaacataatctcaagcagaacgaccagccgatggacatccttcagatcattaactgccttaccactatctacgaccgtctcgagcaagagcacaataacctcgtcaatgtgccgctttgcgtcgacatgtgcctgaattggctcctgaacgtgtacgacaccggaaggaccgggaggatcagggtcctgtccttcaagaccggaatcatttcgctgtgcaaggcccatttggaggataagtaccggtacctcttcaaacaagtggcatcatcaactggattttgcgaccagagaagattgggactcctgctccacgatagcattcagattccacggcaactgggtgaggtggcttcgttcggtggaagcaatattgagccgtccgtgcggtcatgtttccagttcgcaaacaataagccggaaatcgaagcggcgctgttcctcgactggatgaggcttgagccgcaatcgatggtgtggctgcctgttctgcatcgggtggcggccgcggaaacggcaaaacaccaggcaaagtgcaacatctgcaaggagtgcccgattatcggatttaggtaccgctccctgaagcacttcaattacgatatctgtcagagctgtttcttctccggccgagtggccaagggccacaagatgcactaccctatggtggaatactgtactccaaccacctctggtgaggacgtccgtgattttgccaaagtccttaagaacaagttccgcaccaagcggtattttgcaaagcaccccagaatgggttacttgcctgtgcagaccgtccttgaaggggataacatggaaaccgacactatg

SEQ ID NO: 251378 - DNA, 3432 bp, synthetic construct; identical to SEQ ID NO: 251348
  misc_feature 1..3432: note = Description of Artificial Sequence: Synthetic coding sequence
  source 1..3432: mol_type = other DNA

SEQ ID NO: 251379 - DNA, 3432 bp, synthetic construct
  misc_feature 1..3432: note = Description of Artificial Sequence: Synthetic coding sequence
  source 1..3432: mol_type = other DNA
atgctgtggtgggaggaagtggaggactgctacgagcgcgaggatgttcagaaaaagactttcaccaaatgggtgaacgcacagttttcgaaattcggaaagcaacacatcgagaacctctttagcgacctccaagacggtcggcgacttctggacctgctggaaggactgaccggacagaaactcccaaaggagaagggatccactcgggtccatgccctcaacaacgtcaacaaagccctcagagtcctccaaaacaacaatgtcgatctggtgaacatcggatcgaccgatatcgtggacggtaatcacaagctgactctcggcctgatctggaatatcattctgcattggcaagtcaaaaacgtgatgaagaacattatggcgggactgcagcagactaatagcgaaaagatcttgctttcttgggttagacaatcaacgagaaactatccgcaagtcaatgtgatcaactttaccacctcgtggtcggacggactcgccttgaacgcactgatccactcacaccggccagatctgttcgactggaactcagtggtgtgccagcagtccgcaactcagcgcctggagcacgccttcaacatcgcccggtaccagctcggtatcgagaagctgctggacccggaagatgtggataccacctacccggacaagaagtctatactgatgtacattacgtcactgtttcaagtgctgccacagcaggtttccatcgaagccattcaggaggtggaaatgctccctcggccgccgaaagtgacgaaggaagaacactttcagctccatcaccagatgcactattcgcagcaaatcactgtctcactcgctcagggatacgaacggacctcgagcccaaagccccgctttaagtcttacgcgtacactcaggccgcgtatgtcactacctccgacccaactagaagcccgttcccgtcgcagcaccttgaagctcccgaagataagtcattcggaagctccctgatggagtcagaagtgaacctcgacagataccaaaccgcactggaagaagtgctctcgtggctgcttagcgccgaggacacccttcaagctcagggtgaaatcagcaatgacgtcgaggtcgtcaaagaccagtttcacacgcatgagggctacatgatggatctgaccgctcaccaaggccgggtcggaaatatcctgcagctgggaagcaagctcatcggcacgggcaagttgtcggaagatgaagagactgaggtccaggagcagatgaacctgctgaattcacgctgggaatgtctgcgcgtggcctctatggaaaaacagagcaatctgcacagggagatcagctacgtgccatcgacctacctgactgagatcacccatgtcagccaggcccttctggaagtggagcaacttctcaatgcaccggatctgtgcgccaaggatttcgaggacctcttcaaacaagaagaatcactcaaaaacatcaaggattccctgcagcagagcagcggaagaatcgacatcatccactccaagaaaaccgcagccctgcaatcagctactccggtggagcgagtgaagctgcaagaagccctctcacagctcgacttccagtgggaaaaagtgaataagatgtacaaggaccgacagggcaggttcgaccgcagcgtggaaaagtggaggagatttcactacgacattaagattttcaatcaatggctgactgaggcagagcagtttctgagaaagacccagatccccgaaaactgggagcacgcgaagtataagtggtatctgaaggagttgcaggacggaatcggacagcggcagaccgtcgtccggaccctgaacgctactggagaggagattattcaacagtcgtccaagacggacgcgtcaatactccaggaaaagttgggttccctgaatctccgctggcaagaggtttgcaagcagctgagcgatcgcaagaaacgccttgaagagactttggaacggctgcaagagctccaggaggcgacggatgagctggacctgaagctgagacaagcagaagtgatcaagggcagctggcagccagttggagatttgttgatcgattcgctgcaggaccatctggagaaagttaaggctttgaggggcgaaatcgcgccgcttaaggaaaatgtgtcgcacgtgaatgacctggcacggcagctgacgactctggggatccagctttccccgtacaacctctccacgctcgaagatctcaacacccgctggaaactccttcaagtggctgtggaagatcgcgttcggcaattgcatgaggcccacagagacttcggacctgcttctcagcactttctctcgacttcggtgcaggggccgtgggagagagcaatcagcccaaacaaagtcccatactacatcaaccacgagactcaaaccacctgctgggaccatcctaaaatgactgagctgtaccagagcctggcggatttgaacaacgtgcgattctcggcttaccgcactgcgatgaagctcagacgtctgcagaaagcactctgcctcgacctcctttctctctcggcggcgtgcgatgccctggaccaacacaatctcaagcagaatgaccagccgatggacatcctccagatcatcaactgcctgaccaccatttatgatcggctcgagcaggaacacaacaatctggtgaatgtgccactctgtgtcgacatgtgcctgaactggctgctgaacgtctacgataccggtcgcaccggccgcatccgggtgctcagcttcaagaccggtattatctctctgtgcaaggcccatctcgaagataagtaccggtaccttttcaagcaggtggcgtcgtcgactggcttttgcgaccagcggagacttggactgctgctccatgactcaattcaaatcccgcgccagctgggagaggtggcgagcttcggggggtccaatatcgagccgtcagtgcgctcctgttttcaattcgctaacaataagcctgaaatcgaagccgccctcttcctggattggatgcggctggaaccgcagtcgatggtgtggctgcctgtgcttcatagggtggcggctgcggaaaccgccaagcaccaagcgaagtgcaacatctgcaaggaatgccccatcatcggcttccggtacaggtcgctgaagcacttcaactacgatatctgtcagagctgtttcttctctggcagggtggccaagggacataagatgcattacccgatggtggagtactgcactccaactacctccggggaggatgtccgggatttcgcgaaggtgcttaagaacaagttccggactaagcgctacttcgcgaaacatcctagaatgggttacttgccggtgcaaactgtgttggaaggtgacaacatggagactgacacgatg

SEQ ID NO: 251380 - DNA, 3432 bp, synthetic construct
  misc_feature 1..3432: note = Description of Artificial Sequence: Synthetic coding sequence
  source 1..3432: mol_type = other DNA
atgttatggtgggaagaggtagaggattgttacgaaagggaggatgtgcagaaaaaaacgttcacaaagtgggtaaatgcacagttctcgaaattcggaaaacagcacatcgaaaatctcttttctgatcttcaggatgggcggagactccttgatcttctggaagggctaactggacagaaactccctaaagaaaaggggtctacacgggtccacgcacttaataatgtcaacaaggcattacgcgtattgcagaataataatgtagatctggttaacattgggagtacagatatagtggatggaaatcataaactgactttggggttaatttggaatataattctgcattggcaggtcaagaatgttatgaagaacatcatggcgggattacaacagacgaattccgaaaaaattttgctctcatgggtgagacagtctactcgcaactatccacaggttaacgtcattaatttcacaactagttggtcagatggactcgccctcaatgcgctcatacattcccatcgccctgatctatttgattggaactctgtagtgtgccagcagagtgctacacagaggctggagcatgcattcaacattgcccgataccagcttggaatagagaaactgctagatcctgaagatgtggatactacttatcccgataaaaaatcaatcttgatgtatatcactagtctttttcaggtgctcccacaacaggtctcaatagaagccatacaggaagtcgaaatgcttccacgcccacccaaagtaactaaggaggaacactttcagcttcatcaccagatgcactactcccagcagataacggtttccctcgctcagggatatgaaaggacgagttcccccaaaccaaggttcaaaagttatgcttatactcaagcagcttatgtgactacaagtgacccaactaggtctcccttcccttcccagcacttagaggcccctgaagataaatcgtttggatcatccctcatggaaagtgaggttaatctagacaggtatcagacagcactcgaagaggtattatcttggcttctgtcagccgaagatactcttcaggctcagggggaaatttccaacgatgtggaagtagtcaaagaccagtttcatactcatgaagggtacatgatggatcttacggcacaccagggaagagtaggaaatattctgcagctcggatctaagctgattggaacaggaaagttatctgaagatgaagagacagaggttcaggagcagatgaacctgctaaattcgcgatgggaatgtctccgggtggcctcaatggaaaaacagagtaatctccatagagaaatctcatatgttccctcaacatatcttactgagataacacacgtgagtcaggcactgcttgaggtggaacaactgttaaacgctcctgatctctgtgctaaagatttcgaagatctattcaaacaggaagaatctctcaaaaatattaaagattcactacagcagtcttccggacgaatagatataatacattcgaagaaaactgccgctcttcagtccgcaactcccgtggaaagagtgaaacttcaggaagcattgtctcagctggattttcagtgggaaaaagtcaacaagatgtacaaagatagacaggggcgattcgatagatcagtggaaaaatggcgacggttccactatgacataaaaatatttaaccaatggttaactgaggctgagcagttcctcagaaaaacacagatacctgagaattgggaacatgcaaaatataaatggtatcttaaagaactgcaggatggaatcggacagaggcaaactgtggtgaggactctcaatgccacaggggaagagataattcagcagtcctctaaaacagatgcctcaatccttcaagaaaagcttgggagtctcaatcttaggtggcaggaagtctgtaaacagctcagtgatcgcaaaaaacggctggaagaaacattagaaagactccaggaattgcaggaggcaactgatgaactagatctcaaactaaggcaggcagaagtaataaaggggagttggcagcccgtcggagatcttctcatagatagtctccaggaccaccttgagaaagtcaaggccttgaggggggaaatcgcccccttaaaagaaaatgtcagtcatgtgaatgatttagcaaggcagctcacaacactcggaattcagttgtctccatataacctgtctactctggaggatctcaacacaaggtggaaactattgcaggtcgctgtggaagatcgggttcgacagctccatgaagcccatagagatttcgggcccgcaagtcaacacttcctgtcaacttctgtgcagggaccttgggaacgggctatctcacctaataaagtaccctactacatcaatcatgaaacacagacaacttgttgggatcatcccaaaatgacggaactataccagtccctagcagatctaaacaacgtcagattctcagcatatcgaactgccatgaaactgcggcgcttacaaaaagccttatgtctggatctcttatctctgagtgccgcatgtgatgcattagatcagcacaatctgaaacagaacgatcagcctatggacatcctgcagataatcaactgcctcactactatatatgaccgcctcgaacaggaacataacaatttggtgaatgtccctctctgcgtggatatgtgtctcaattggctgttaaacgtctatgacactggacgaacggggcgaattcgagtactgagtttcaagacagggattatatcactctgcaaagcccaccttgaggataagtaccggtacctgtttaaacaggttgcttcatctacaggattctgtgatcagcggcgactcgggcttctcctacatgattctatccagattcctaggcagttaggggaagttgcttctttcggagggtccaatattgagcccagtgtccgcagttgcttccagtttgccaacaacaaacctgagatcgaagccgccctctttctcgattggatgaggctagagccccagtctatggtgtggttaccagtactacatagggttgcagccgctgaaactgccaaacatcaggctaaatgcaacatttgcaaagaatgccctatcatcggatttcggtaccggtcacttaaacactttaattatgatatttgtcagtcatgttttttttctgggagagtggctaaaggacataaaatgcattatcctatggttgaatattgcacacctactacatctggagaagatgtccgtgatttcgctaaggtactgaaaaataagtttcgcactaaacgatattttgccaaacatccccggatggggtatctcccagtgcagactgtccttgaaggggataatatggaaactgatacaatg

SEQ ID NO: 251381 - DNA, 3432 bp, synthetic construct
  misc_feature 1..3432: note = Description of Artificial Sequence: Synthetic coding sequence
  source 1..3432: mol_type = other DNA
atgttgtggtgggaggaagtggaagactgttatgagcgtgaagatgtccagaagaaaacattcactaaatgggttaacgctcaattctccaaatttggaaagcaacatatcgagaaccttttttcagatttgcaggacggacgacgactgctggatctattggaaggccttactggacagaaactgccaaaggagaaagggtcaacaagggttcacgctctgaacaacgtcaataaggctctgcgcgtactgcagaataacaacgtagacctggtcaacattggatctacagatatagttgatggaaaccacaagctgacccttggccttatttggaatatcatcctgcattggcaggttaagaatgtgatgaaaaacatcatggccggtttgcagcaaactaacagcgagaaaattctcctttcttgggtacggcaaagcaccagaaattatccgcaggtgaacgtgatcaacttcaccacgagctggagcgacgggcttgcgctgaacgccctgatacacagccacagacctgatctattcgactggaactccgtggtgtgccaacagtctgcgacacagagactcgagcatgccttcaatatagcacgctaccaattgggaatcgagaaactcctggatcctgaagacgttgatactacatacccagataagaaatccatcctgatgtacatcaccagcctgttccaggtcctgccacaacaggtctctatcgaagcaatccaagaggtggagatgctgccccgaccccctaaggtgacgaaagaggagcactttcagctccatcaccagatgcattactcccagcaaatcaccgtgagcttagctcagggctatgaaaggacctcctctccgaaacctcgctttaagtcatacgcgtacacccaggctgcttatgtcaccacctcagatcctactagatctccctttcctagccagcatctggaagctccagaggacaagagctttggctcctcactgatggaatctgaagtcaatctggaccgatatcaaactgcactggaagaggtgttaagttggcttctcagtgcagaagacactttacaagcacagggtgaaatcagcaatgacgttgaagtcgtgaaagaccaattccatactcatgaaggatacatgatggatctcacagctcaccagggtagagtcgggaacatcctgcagttgggatccaaattgatcggaaccggtaaactgtctgaggacgaggagaccgaggtgcaagagcagatgaacttgctgaattcaagatgggaatgcctccgggtggctagcatggagaagcagtctaacctgcatcgagagataagttatgtaccatcaacataccttacagagattacccacgtttctcaagctctgctggaagtcgaacagctcctgaacgcacccgacctgtgcgctaaagactttgaagaccttttcaagcaggaggaatcgcttaaaaatatcaaggattccctccagcagtcctctgggaggattgatattattcatagcaagaagactgccgcccttcaatctgcaacacccgtcgagagagtcaagttgcaggaagcactgagccaactggatttccagtgggagaaagttaacaaaatgtataaggacaggcaggggcgcttcgatcgcagcgtggagaagtggaggcgcttccattatgatataaaaatctttaaccaatggttgacagaggcagaacagttcctccggaagacccagattccagagaattgggaacatgctaagtataagtggtacctgaaggagctccaggacggaatcggccaacggcaaacagtcgtgagaaccctcaatgccaccggcgaagaaattatccaacagagtagcaaaaccgatgccagcatccttcaagagaaattgggcagcctgaacctgagatggcaggaagtgtgcaaacagttgagtgaccgcaaaaaaaggctcgaggagacccttgaacgactccaagaactgcaggaggctactgacgaactggatctgaagcttaggcaagcggaagtgattaagggcagctggcagccagtgggagatctgttgatcgactctctgcaagaccacttagaaaaggtgaaagctctgcgtggagagatcgccccgctgaaggagaatgtgagtcatgtaaacgacctcgcacggcagctcacgacactgggcatccagcttagcccctacaacctttccaccctcgaagaccttaacacaaggtggaaactcttacaagtggccgtagaagatcgggtgaggcagttgcatgaagctcacagggacttcggtcccgcttcacagcattttctttcgaccagcgtgcagggcccttgggagagagctatcagtccgaacaaagttccatattacattaaccacgagacccagaccacctgttgggaccaccccaagatgacagagctgtaccagagtctggccgacctgaacaatgtgcgcttttctgcatacaggactgctatgaaactgcgacgcctccaaaaggcgttgtgcctcgacctgttgtctctctctgccgcttgcgacgccttggatcaacacaacctgaagcagaacgatcagccaatggacatcctccagatcattaactgcctgactacaatatacgacaggcttgaacaagaacacaacaacctggtgaatgtcccactgtgtgtggatatgtgtctgaactggctgctgaacgtgtacgacaccggacgcacaggcagaatacgcgtgctaagctttaagactggcataatcagcctgtgtaaggcccatctcgaagacaaatatagataccttttcaaacaggttgcttcatccaccggtttctgtgaccagaggcggttgggattgcttctccatgatagcatccagattccaaggcagctgggagaggttgcgagcttcggaggatccaatattgagcctagcgtcaggagctgtttccagttcgccaataataagccagagatcgaggctgccctgtttctcgattggatgcgactggagccccagtctatggtttggcttccagtgctccacagagtggcagcagcagagaccgcaaagcatcaagcaaaatgtaatatttgcaaggagtgcccaatcatcgggtttcgctacagaagcctcaagcattttaactacgacatttgccaatcttgcttcttctctggaagggtggcaaaaggccacaaaatgcattaccctatggtggaatattgcactccaaccacgtccggcgaggatgttagagatttcgcaaaggtgctgaagaacaagtttagaacaaagagatactttgccaagcacccacgcatgggatatcttcctgtccagactgtcctagagggcgataacatggagaccgataccatg

SEQ ID NO: 251382 - DNA, 3432 bp, synthetic construct
  misc_feature 1..3432: note = Description of Artificial Sequence: Synthetic coding sequence
  source 1..3432: mol_type = other DNA
atgctgtggtgggaagaggtggaggattgttacgagagggaggatgtccaaaagaagaccttcaccaagtgggtgaacgctcagttcagcaagtttggaaagcagcacattgagaacctgtttagcgatctgcaggacgggcgacggctgctcgaccttctagagggccttactgggcagaaactgcccaaggagaaagggagcacgcgggtgcatgccctgaacaacgtgaacaaagccttgagagtgctccagaacaacaatgtggacttggttaacatagggtccacggatatcgtcgacggtaatcacaaattgaccttgggattgatttggaacataattcttcattggcaagtcaaaaacgtgatgaagaatattatggccggtttgcagcaaactaattccgagaaaattttgctgtcttgggtgagacagtccacacgcaactatccacaggtaaatgtcattaactttacaacctcttggagcgatggactagccctgaatgccttgatacacagccacagacccgacctattcgattggaattccgttgtgtgccaacagagtgcaacacagaggcttgaacatgccttcaacattgctcgttaccagctgggtattgaaaaactgttggaccccgaggatgtcgacaccacctatcctgataaaaagtcaatcttgatgtacatcacttctttgttccaggtgttgccacagcaagtgtccatcgaggctattcaggaggtggaaatgctgcccaggcctcccaaggtgaccaaagaggagcattttcaactgcatcaccagatgcactacagccagcagattaccgtgagcttggcccagggctatgagagaactagttcccccaagccccgcttcaagtcgtatgcttatactcaggcagcctacgtaacaacgtctgacccgacacgcagcccttttccctcacaacatctcgaggctcctgaagacaaatcatttggatcctctctaatggagagtgaagtgaatctggaccggtaccagacagctttggaggaggtattgtcttggctgctgagcgccgaagacaccctccaggctcagggagaaatcagtaacgatgtggaagtcgtcaaagaccagttccacacacacgagggttacatgatggacttgacggcacaccaggggcgggtgggtaatatcttgcaactgggttccaagctgatcgggacaggcaagttgtccgaggacgaggaaacagaagtccaggagcagatgaatttgctgaactctagatgggaatgcctgcgtgttgccagcatggagaaacaatctaatttacatagagagattagttacgtaccatcaacttatctgacggaaatcactcacgtatcccaggcactgctagaggtggagcaactattaaacgctcctgatctgtgcgcgaaagatttcgaggatctctttaagcaagaggagtccctgaaaaacatcaaggactcgctgcaacagagctctgggagaatcgacattatccactccaagaagaccgccgcactgcagtcagccacacctgttgaacgcgtcaagctgcaagaagcattatctcaactagatttccagtgggaaaaggtgaataaaatgtacaaagacagacagggacgcttcgatcggtcggtggagaagtggcggaggttccactacgatatcaaaattttcaaccagtggttgaccgaggccgagcagtttctcagaaaaacccagatccccgagaattgggagcacgccaagtataagtggtacttgaaggaactccaggacggcattggccagcgtcagaccgtcgtgagaacactcaatgccactggggaggagataattcagcaatccagcaagaccgatgcgtctattctccaggagaaacttgggtctctcaatttgcgctggcaggaagtttgcaagcagctgtccgatagaaaaaaaagactggaagagacactggaacgactgcaggaactccaggaggcaactgatgaactagatctgaagcttcgccaggccgaggttatcaaaggcagctggcagccagttggtgacctgttgattgacagtttgcaggatcacctggagaaagtcaaggccttgagaggggaaatcgcccccctgaaggaaaacgtgtcacacgtcaacgatcttgctcgccaattgaccacccttggcattcagctaagcccttataaccttagcactttggaggaccttaataccaggtggaagctgctacaagttgctgtcgaggacagagtgcgccagctccatgaggctcacagggattttggacccgccagtcagcatttcctcagtacaagcgttcagggaccatgggaaagagcaatttctcccaataaagtaccctactatattaatcatgagacgcagacgacatgttgggatcaccctaaaatgacagagctgtaccaatcactagcggacctaaataacgtacgattcagtgcctaccgaactgccatgaagctacggcgacttcagaaggcactgtgtctggacctcctgtctctgagcgcagcctgtgatgccctggaccagcataatctcaaacagaatgatcagcccatggatattttacaaattatcaactgtctaacaacgatctacgaccgactcgagcaggagcataacaacttagtgaacgtccctttatgcgttgatatgtgcctgaattggctgctaaacgtttacgacacggggaggactggccgaatcagggtgctgtcattcaagaccgggatcatctctctatgcaaggcacaccttgaagacaagtataggtatctgtttaagcaggtagcctccagcaccggtttctgcgaccagaggaggctgggtctcctgctgcacgattcgatccagatcccaagacagctcggtgaagtggcaagctttggggggagcaacatagaaccctcggtcagaagttgtttccaatttgccaataacaaacccgagattgaagccgccctttttcttgattggatgcgcctggagccccagtctatggtttggctgcccgtactccacagggttgccgcggcagaaaccgcaaagcaccaggcgaagtgtaacatctgtaaggagtgcccaatcatcggattcagatacagatcactgaagcattttaattatgatatttgccaatcatgtttctttagtggccgcgtagccaaagggcacaagatgcattatccaatggttgaatactgcacacctacaacttctggtgaggatgtaagggattttgctaaggtgctgaaaaataaattccggaccaagaggtattttgcgaaacaccctcgtatgggatacttgccagtgcaaaccgtcctggagggcgacaacatggagaccgacaccatg

SEQ ID NO: 251383 - DNA, 3432 bp, synthetic construct
  misc_feature 1..3432: note = Description of Artificial Sequence: Synthetic coding sequence
  source 1..3432: mol_type = other DNA
atgctgtggtgggaagaggtggaggattgttacgagagggaggacgttcagaagaaaactttcaccaagtgggtcaacgcccagttttctaagtttggaaaacaacacatcgagaacctgttctccgacctgcaggacggtcgccgcctgctcgatctgctggaaggactgaccggccagaaactccccaaggagaaaggatcaactcgggtgcatgcgctgaataacgtcaataaagccctgagagtgcttcaaaacaacaatgttgacttggtcaacattggaagcactgacatcgtggacggtaatcataaactgaccctgggtcttatctggaacatcatcttgcactggcaggtgaagaacgtgatgaagaacattatggctgggcttcagcagacgaactccgagaagatcctgctctcgtgggtgcgccaatccacccggaactacccgcaagtgaacgtgatcaacttcaccacttcctggtcagacggactggcactcaacgcactcattcattcgcacaggccggatttgttcgattggaactcagtggtctgccagcaaagcgcaactcaacggctcgagcacgccttcaacattgcgaggtaccagttgggaatcgaaaaactgctcgaccccgaagatgtggacactacttacccagataagaagtcgatccttatgtacattaccagcctgttccaagtcttgccgcagcaagtgtcgatcgaggcgatccaagaagtggaaatgctgccgcggcctccgaaagtgactaaggaagagcacttccagttgcatcaccagatgcactacagccaacaaatcaccgtctcactcgcccagggatacgagcggacttcgagccctaaaccacggttcaaatcgtatgcatacacgcaggcagcttacgtgactacctcagatccaactcgatccccgtttccaagccagcacctcgaagctcctgaggacaagtcctttggttcgtcactgatggaatccgaagtcaatctggacagataccaaactgccctcgaagaagtgctgtcatggctcctctcggcggaagatactctgcaagcgcagggagagatcagcaacgatgtggaagtggtcaaggaccagttccatacgcatgaaggttatatgatggacctgacggctcatcaaggccgagtcgggaacatcttgcaactcggttccaaacttattggtaccggaaagctgtcagaggacgaggaaaccgaagtgcaagaacagatgaacctgcttaattcgcggtgggaatgtctgcgcgtcgcttccatggaaaaacaatcaaacctgcaccgggaaatctcctacgtgccgtccacctacttgactgagatcactcatgtctcgcaggcacttctggaagttgaacagctcctgaatgcacctgacctgtgcgccaaggacttcgaagatctgttcaaacaggaagaaagccttaagaatatcaaggattcgctccagcagtcgtcgggacggattgatatcattcacagcaagaaaacggccgcactgcagtccgccactccggtggaacgagtgaaactccaagaagcgctgtcccagctggactttcaatgggaaaaggtgaacaagatgtacaaagaccgccagggccgcttcgacagatccgtggaaaaatggcgccggtttcattacgacatcaagatctttaatcaatggctgaccgaagcagaacagttcctcagaaagactcaaataccggagaactgggaacatgcgaaatacaagtggtatctcaaagaactgcaagacggtatcggccaacgccaaacggtcgtccggaccctgaacgccaccggggaagaaatcatacagcaatcaagcaagactgatgcatccatcttgcaggaaaagttgggatcactcaatcttaggtggcaagaggtctgcaagcaactgtcagatagaaagaagagactcgaagagactctggaacggcttcaagagcttcaggaggccactgacgaactggatctcaagctccgccaggcagaggtgatcaaggggagctggcagcccgtcggagatctcctcatcgactcgctgcaagaccatttggaaaaagtcaaggcacttcgcggcgagattgctccgctgaaggaaaacgtgtcacacgtgaatgatctggctaggcaactgacgacgctgggcatacagttgtcgccatacaatctctccactctggaggacctgaacacccgctggaagctgctgcaagtcgcggtggaggaccgagtcagacagctgcacgaagcgcatcgggactttggacctgccagccagcacttcctgtccacttcggtccagggtccatgggagcgcgcaatttccccgaacaaggtcccatactacattaaccacgagactcagacgacctgctgggatcatccgaaaatgaccgagctgtaccagtcgctcgctgacctcaataacgtgcgctttagcgcgtacagaactgccatgaaactcagacgcctgcagaaagctctgtgcctggatctcttgtcgctttcggccgcttgcgatgctctggaccagcataacctgaaacaaaacgaccagccgatggacatcctgcaaatcatcaactgtctgactactatttacgatcgcctggaacaggagcacaacaacttggtcaacgtgccactctgcgtggatatgtgcctgaattggctcctgaacgtgtacgacaccggaaggactgggaggattcgcgtgttgtcgttcaaaactgggattatcagcctctgcaaggcgcatctcgaggataagtacaggtatctgttcaagcaggtggcatcgtccaccggcttctgcgatcagagacgtctggggctcttgctgcatgactcgatccagatcccgcggcagctgggcgaggtggcttcctttgggggctccaacatcgagccatcggtgcgcagctgcttccagttcgcaaacaataagccagaaatcgaggccgcgctgttcctggactggatgcgcctggaacctcagtcgatggtgtggctgcccgtgctgcaccgggtggcggcagcggaaactgcgaaacaccaggcgaagtgcaatatctgtaaggaatgtccaatcatcggtttccggtacagaagcctgaagcatttcaattacgatatctgtcaaagctgcttcttctccggaagagtggcaaaaggacacaagatgcactaccctatggtggaatactgcacgccgacgacctcgggcgaagatgtccgcgatttcgcaaaggtccttaagaacaaattccggaccaagaggtactttgcaaagcatccacgcatgggttacctcccggttcagacggtgctggagggagataacatggaaaccgacactatg

SEQ ID NO: 251384 - DNA, 3432 bp, synthetic construct
  misc_feature 1..3432: note = Description of Artificial Sequence: Synthetic coding sequence
  source 1..3432: mol_type = other DNA
atgctttggtgggaggaagtggaagattgttacgagagagaggacgtgcagaagaaaactttcactaaatgggtcaacgcacaattttcaaaattcggaaagcagcatattgagaatttgtttagcgatcttcaagatggtcgtaggctcttggatctgttggaaggactgaccggacaaaaacttccaaaggaaaaaggtagcactcgtgtgcatgctcttaacaacgttaacaaagcgctgcgggtccttcagaacaataacgtcgaccttgttaacatcggttccacggatattgtggacggtaatcacaaactgactttgggactcatctggaacataatccttcactggcaagtgaagaatgttatgaagaacattatggccggtctgcagcagaccaacagcgaaaagatcctcctgtcatgggtccgccagtcaactcggaactaccctcaggtgaacgtgatcaactttaccacgtcgtggtcagatggacttgcactgaacgccctgatccatagccatagaccggacttgtttgattggaacagcgtggtgtgtcagcaatcggccacccagagactcgaacacgctttcaacatcgcacgctaccaactcggcattgaaaaacttctggaccccgaagatgtggataccacttatcccgacaagaaatcaatcctgatgtacataacttcactgttccaggtgcttccccagcaagtgtccattgaggcaatacaagaagttgagatgctcccacgtccacccaaagtgaccaaggaagagcattttcagcttcatcatcaaatgcattactcccaacaaattaccgtctcccttgcccaaggctacgagagaacttcctcgcccaagccccgcttcaaatcatacgcctacacccaagcagcatacgtgactacctcggatcctacccgctcgccctttcctagccagcatcttgaggctcccgaggacaaatcgttcggttccagcttgatggaatccgaagtcaaccttgatagataccaaaccgcgctcgaggaggtgctgtcctggctcctgtcagctgaagatactctgcaggcccaaggagaaattagcaatgacgtggaggtggtgaaggatcagttccatacccacgagggttacatgatggaccttaccgcccaccagggacgggtcggcaacatccttcaactgggatccaagctcattggaactggaaagttgtccgaagatgaggaaaccgaagtgcaggaacagatgaatcttctgaactcaagatgggaatgcctgagggtggctagcatggaaaagcaaagtaacctgcaccgcgaaatttcgtatgtgccttcgacctacctgactgaaattactcatgtgtcgcaagcactgcttgaggtggaacagctgctcaacgcgcccgatctttgtgcaaaagattttgaagatctgtttaaacaagaagaatccctgaagaacatcaaggactctctgcagcaaagctcgggtaggattgacatcattcactcgaagaaaaccgcagccctccagtcggccactccagtggaacgggtgaaacttcaagaggccctctcgcaactggatttccagtgggaaaaggtgaataagatgtacaaggatcgacagggtcgatttgacaggtccgtggagaaatggaggagatttcattacgacattaagattttcaatcagtggctgactgaagcggaacaattccttagaaagactcaaattcccgaaaactgggagcatgcaaagtacaagtggtacctgaaggaactgcaagacggaatcggacaaagacagactgtggtgcgaaccctgaacgcaacgggagaggagattatacagcaatcgtccaagaccgatgcttcaattcttcaggagaagctgggttcgcttaatctcaggtggcaagaggtgtgtaagcagctgtccgacaggaagaagagattggaggaaactcttgagagactccaggaactgcaggaagcaactgacgaactcgacttgaaacttcgacaggccgaagtcattaagggttcctggcaacctgtgggagacttgctgatcgattcattgcaggatcatcttgagaaggtcaaggcacttcggggggagatcgcgccactgaaagagaatgtgagccacgtgaacgacctggctcgtcagcttactacccttggaattcagctttctccgtacaacttgtcgacgttggaagatcttaatactaggtggaagctgttgcaagtggccgtggaagatagggtcagacaacttcacgaagcgcatcgagattttgggcctgcctcacaacattttctgtccacgagcgtccagggaccctgggagagggcaatttcccccaataaggtcccatactacataaaccatgaaacgcaaactacctgctgggatcatccgaagatgaccgagttgtatcagtcgctcgcagacttgaacaatgtgcggtttagcgcgtataggactgcaatgaaactgaggcgcctgcagaaagcactctgtctggacctcctgagcctttcggcagcatgtgacgcacttgatcaacataatctgaaacagaacgatcagcctatggatatactccagattatcaactgtctgaccactatctacgataggctcgaacaggaacataacaaccttgtgaacgtccctctgtgcgtggatatgtgtctcaactggcttcttaatgtgtacgacaccggtagaaccggaagaatacgtgtgctgtcgttcaaaaccggcattatctccttgtgcaaggcacacctggaagataagtaccgatatttgtttaagcaagtggcaagctcaactgggttttgtgatcagcggcgcctgggactccttcttcacgattcgattcaaatcccacggcaacttggtgaagttgctagcttcggagggtcaaacatcgagccaagcgtgcgatcatgtttccaatttgcaaacaacaagcctgagattgaagcagccctttttctcgattggatgagactcgaaccacagtccatggtgtggttgcctgtgcttcatagagtcgcagcagcggaaaccgcaaagcaccaggcgaaatgtaacatttgcaaggagtgccctatcattggtttccgttatcgttcgctcaaacacttcaactacgatatttgtcaatcgtgcttcttttccggtagagtggcgaaaggacacaagatgcattatcccatggtggaatactgcacccctacgacgtccggagaagatgtgcgggactttgcaaaggttctgaagaataagttccggaccaagcgctactttgcgaagcatccacgtatgggatacctgcctgtgcagaccgtattggagggcgacaacatggaaaccgatacgatg

SEQ ID NO: 251385 - DNA, 3432 bp, synthetic construct
  misc_feature 1..3432: note = Description of Artificial Sequence: Synthetic coding sequence
  source 1..3432: mol_type = other DNA
atgctgtggtgggaagaggtggaagactgctatgagagagaggacgtgcagaaaaaaacgtttacgaagtgggttaatgctcagtttagcaaattcggtaagcagcacattgagaatctttttagcgacctgcaagatgggcgccggctcctggatcttctcgagggattgaccgggcagaagctgcccaaggagaaaggtagtacgagggtgcatgccctcaacaatgtaaacaaggcccttcgggttttacaaaacaataatgtcgacctcgtaaacattggatcaactgatattgtggatggcaaccataaactgaccttaggactgatctggaatatcatcctacattggcaggtgaaaaacgtgatgaagaatattatggcaggactgcagcagaccaactcagaaaaaatactgctgtcttgggtgaggcagtctaccagaaactaccctcaggtgaatgtaattaattttacgactagctggagtgacggactggcattaaacgcactcatacactctcatcgacccgacctgtttgattggaacagtgttgtatgccagcagagtgctactcaaaggctcgaacatgcttttaacattgccagatatcaactgggcatcgagaagctgttggatcctgaggatgtggatactacgtatcctgacaagaaatctatcctcatgtacattacttccctattccaggttctgcctcaacaggtgtccattgaagccatccaagaagtggagatgctgcccaggcctcctaaagttaccaaagaagaacatttccagttgcatcaccagatgcactactctcagcaaattactgtcagtctagcccagggatacgagaggacatcaagccccaaaccgagattcaagtcatacgcctacacgcaggccgcctacgtgactacctcagacccgaccaggagtcccttcccctcccaacatctcgaagctccagaggataagtcattcgggtcatccttgatggagtctgaagtgaatctggaccgttaccaaacggctctggaggaagttctgtcctggctgctgtcggccgaggatactctgcaggcccagggagaaatcagcaacgatgtcgaagtagtgaaggaccaattccatacccatgaggggtatatgatggatcttactgcgcaccagggaagggtgggcaacatcctgcagcttgggagtaagcttatagggacgggaaagcttagtgaagacgaagaaaccgaggtgcaggagcagatgaatctgcttaactcacggtgggagtgcttgagagtggccagcatggaaaagcaaagtaatctgcatagagaaatcagctacgtccctagtacgtacctgaccgagatcactcacgtttcccaggcgcttctcgaggtagagcagctgctgaatgcaccggatctttgcgctaaggactttgaagatctcttcaaacaagaggagagcctcaaaaatatcaaggactccttacagcagtcatccggaaggatcgatattatccattctaaaaagaccgcagctctgcagagcgcgacaccagtcgagagggtgaaactgcaagaggccctttcccagctggactttcaatgggaaaaggtcaacaaaatgtacaaggatagacagggccggtttgacaggagcgtggaaaagtggagacgttttcactatgatattaagatattcaaccagtggctgaccgaagccgagcagttcctgcggaaaacccagatcccagaaaactgggagcacgccaagtataaatggtatctgaaggaactccaggacggcattgggcaacgtcagaccgtcgtgagaacactcaacgccacgggagaggaaatcattcagcagtcgtctaagactgatgctagtatcctgcaggaaaaacttggatccttgaatctgcgctggcaggaggtgtgtaaacagctgagtgaccgaaagaaacgactggaagagactctagagcgcctgcaggagttgcaggaggcgactgatgaattagacctaaaactgcggcaggccgaagtaatcaaaggatcttggcagccagttggggacctgctgatcgattctctgcaggatcatctcgagaaggtgaaggcattgcgcggcgagatcgccccactgaaagagaatgttagtcatgtgaacgatctggccagacagttgactaccctcgggattcagctgagcccttataatctgagtactttggaggatctcaatactaggtggaaactactgcaggtggcggtcgaagatcgtgtgagacagctccatgaggcgcaccgtgactttgggcccgcaagccaacattttctgtccactagtgtccagggtccatgggaaagggccatcagcccgaataaggtcccttactatattaatcatgagactcaaacaacctgttgggaccaccctaagatgacagaactttaccagagcttagccgatcttaataacgtccgcttttcagcctaccgaacagccatgaagctgaggagattacagaaggccctctgcctggacttgctaagtctgtcagcagcgtgtgacgccttagatcagcacaacctgaaacagaatgaccagcctatggacattctacagatcatcaactgcctcaccaccatctacgaccgtctagagcaggagcacaacaacttggtgaacgtccctctatgtgtggatatgtgcctcaactggcttctgaacgtctacgatacggggcgtaccggccgcatcagagtgctctcattcaagaccggaatcatctctctttgcaaggctcacctggaggacaaatacagatacctttttaagcaggtggcaagctccacaggattttgcgaccaacggcgtctgggtttactcctgcacgactctattcagatacccagacagttaggtgaagttgcatcctttgggggtagtaatattgagccatccgtgagatcttgcttccagttcgccaacaataaacccgaaatcgaggcggccttgttcttagactggatgcgcttagagcctcagagcatggtgtggttgcctgtgctgcacagagtggcagcagcggagactgcaaaacaccaagcaaaatgcaacatttgcaaagagtgccccatcataggattcaggtacaggtcactgaagcactttaattacgatatctgccagagctgtttctttagcggaagggtggctaagggccacaagatgcactacccaatggttgagtattgcacaccaacaacttctggagaagatgtccgcgattttgccaaggtgttgaaaaacaaattcagaacaaaaaggtattttgctaagcatccccgcatggggtatctgccagtgcaaaccgtgctggaaggggacaatatggagacggacacgatg

SEQ ID NO: 251386 - DNA, 3432 bp, synthetic construct
  misc_feature 1..3432: note = Description of Artificial Sequence: Synthetic coding sequence
  source 1..3432: mol_type = other DNA
atgctctggtgggaggaggttgaagactgctacgaaagagaggatgtccagaaaaaaaccttcacgaagtgggtgaatgcgcaattctccaagtttggcaaacagcatatcgagaatctgtttagtgacctgcaggatggacggagactgctggatctgttggaaggcctcactggtcaaaagcttccaaaagagaagggaagcacacgggtccatgccctgaacaacgtgaacaaggctctccgggttcttcaaaacaacaatgtcgacctggtgaatattggcagcactgacatcgtggatggaaaccacaaactgacactcgggctgatttggaacatcatcctccattggcaagttaaaaacgtgatgaagaatatcatggctggattgcagcaaacaaatagtgagaagatactcttatcgtgggtgagacaatccacacggaactatcctcaggtgaatgtgatcaattttaccaccagctggagcgatggcttagcactgaacgcactaattcattctcatcgaccagatttatttgactggaactccgttgtatgtcagcaaagtgccactcagaggcttgagcacgcctttaacatagctagatatcagttgggaatcgagaaactcctcgatcctgaagacgtagacacaacttatcccgacaagaagtcaattctgatgtatattacttctctatttcaggtgctccctcagcaggtcagtatcgaggctatccaagaggttgagatgctgccccggccacccaaggtgacaaaggaggagcactttcagctacaccaccagatgcattatagccagcagatcactgtgtcattggcccaaggatatgaaagaaccagcagcccaaaaccgcgctttaagagctatgcctacacccaggctgcctacgtgacaacatccgacccaacaaggtcaccctttccttcgcagcaccttgaggctcccgaggataagtccttcggatctagcctgatggaaagcgaggtgaatctggaccgctatcagacggcactcgaggaggtactgtcctggctgctcagcgccgaggatacactccaagcgcaaggcgagatctccaatgatgtggaagttgtcaaggaccagttccatacccatgaggggtacatgatggatctgaccgcccaccagggtcgggtaggaaatatcctccagctgggctctaagttgatcgggaccgggaaactgtctgaggacgaggagaccgaggtgcaggaacagatgaatcttctgaattcccgctgggagtgcttacgggttgcctctatggagaagcagtctaatctgcaccgggagatatcgtatgtgcctagtacttatctgacagagatcacacatgtcagccaggctctgctcgaggtggaacaattgctgaatgctccagacctctgtgccaaggattttgaggacttattcaaacaagaggagtcccttaagaacatcaaagattccctccagcagagctctggccgcattgatatcattcacagcaagaagactgccgccctgcagtctgcgacccccgtggaaagagttaaactccaggaagctctgtcccagctagatttccagtgggagaaggtgaacaagatgtacaaagatcgccaagggcggtttgatcggagcgtggaaaagtggcgacgtttccattatgacatcaaaatttttaatcagtggttgaccgaagcagaacagttcctgcgaaaaactcagatcccagagaattgggaacacgccaagtacaagtggtatttgaaggagcttcaggatgggattggtcagaggcagacagtggtgagaactttgaatgcaacgggggaggagattattcagcagtcgtctaagacagatgcctcaatcctccaggaaaaactgggaagcctgaacctccggtggcaggaggtctgtaaacagctaagcgataggaaaaagcgtctcgaggagacactggagcggctgcaggagcttcaggaggccactgatgagctagacctgaaattgaggcaagcagaggtgatcaaaggatcatggcagcccgtcggtgacctgctgattgactccttacaggaccacctggagaaggtgaaggcactgcggggggaaattgctccactgaaggaaaacgtatcccacgttaacgacctcgcaagacaactgactactttgggtatacaactctctccatacaacctgagcacgctagaggacctgaatacacgatggaagctccttcaggtggcagtggaggatagggtgcggcaactgcatgaggcacatagggacttcggcccagccagtcagcactttctcagcaccagcgtacagggaccttgggaacgcgccatttccccaaacaaggttccttattacattaaccatgaaacccagactacttgttgggaccacccaaagatgaccgagttgtatcagtcactggccgacctgaacaacgtgcgattctccgcatacagaacagccatgaagttgaggcgcctgcagaaggcactgtgcctggacctactctccctgagcgcagcatgtgatgctttggaccagcataacctgaaacaaaatgatcaaccgatggatatactgcaaatcattaattgtctgacgactatatacgatcgcttagaacaggagcataacaacctcgttaatgtccctctgtgtgtcgatatgtgtttaaactggcttctgaacgtatatgatacagggcgaaccggccggataagggtcctgagctttaagaccggaattatttcgctttgtaaggcgcacctggaggataaataccggtacctgtttaagcaggtggccagctcaacgggtttctgtgaccagcgccggctgggccttttactgcatgatagtatccagattccaagacagctgggcgaagtggcctctttcgggggatctaatatcgagccctctgttcggtcctgcttccagttcgctaacaacaagcccgaaatcgaggcagccctcttcttggattggatgaggctggagccccagagcatggtctggctgccagtgctccatcgggtggctgcggctgagacagctaaacaccaagccaagtgtaatatttgcaaggagtgccccatcattgggtttcggtacaggtccctgaaacacttcaactacgacatctgccaatcttgcttctttagcggtagagtggccaagggccataagatgcactaccctatggttgagtattgcactcccacgacaagtggagaagacgtgcgagattttgccaaagttctgaagaacaaattccgaactaaaagatacttcgctaaacacccgcgaatgggctatctgccagttcagaccgtgctggagggcgacaacatggaaactgataccatg

SEQ ID NO: 251387 - DNA, 3432 bp, synthetic construct
  misc_feature 1..3432: note = Description of Artificial Sequence: Synthetic coding sequence
  source 1..3432: mol_type = other DNA
atgctgtggtgggaggaagttgaggactgttatgaacgagaagacgtccagaaaaagacgtttacaaaatgggtaaatgctcagttcagtaaatttgggaagcagcacattgaaaatctttttagtgatttgcaggatggtagaagattactggatctgttggagggattgactggtcaaaaattacccaaggagaagggatcaacccgtgttcacgctctgaataatgtgaataaagctcttcgtgttctacagaataacaacgtcgatttagtcaatattgggtccacggatattgttgacggaaatcacaaattaactcttggactcatctggaacataattctacactggcaggtaaaaaatgtgatgaaaaacattatggctggattacagcaaactaactctgaaaaaattttgttaagttgggtaagacagtcaacgcgaaattacccacaagttaatgtcatcaattttactacatcctggtcagatggtttggcactcaatgctttaattcatagccatagaccagatttgtttgattggaactcggtcgtctgtcaacaatcagccacacagcggctcgagcatgcatttaacattgctcgttatcaattaggaattgagaagctactcgaccctgaagatgtagatacgacatatcctgacaaaaagtcaatactcatgtacatcacctcacttttccaggtactcccacaacaagtgtctatcgaagccatccaagaagtagaaatgttgccacgaccgccaaaagtaacaaaagaagagcatttccaactacaccaccaaatgcactatagtcaacagattactgtatctcttgctcaaggatatgaacgtacgtcatcgcctaagccccgctttaagtcttatgcatacactcaagctgcttatgttaccacgtcagatccgacccgtagtccattcccatcacagcatttggaagcccctgaagataagtcatttggatcaagtttaatggagtcggaggtgaacctcgatcgttatcagactgcacttgaggaagtgctttcttggctacttagtgctgaggacacccttcaagcacagggagagatctctaacgatgtggaagtcgttaaagatcaattccatacacacgaaggctatatgatggatttgaccgcccaccaaggacgggtgggtaacatacttcaacttggaagtaaattaattggaactggaaagctctcagaagatgaggaaacagaagtgcaagaacagatgaatttgctaaactccagatgggaatgtcttcgagtcgcgtcgatggagaaacaatctaacttacaccgtgaaattagttacgtcccaagtacatatcttacagaaatcacacacgtttctcaagcccttctcgaagtcgagcaattgctcaatgcaccggatttgtgtgctaaggattttgaggacctttttaaacaagaagaatcgctaaagaatattaaagattcactacaacaatcgtcgggacgaatagatataattcattcaaagaagactgcagcgctccaatctgcaactccagttgaacgcgttaagttacaagaagcactaagtcagctagatttccagtgggaaaaagtcaataaaatgtacaaagatagacaaggaagatttgatcgttctgttgaaaaatggagaagatttcattatgatatcaaaatattcaatcaatggttaactgaggctgagcaattccttagaaagacacaaatacctgagaattgggagcacgcaaagtataaatggtacctcaaggagctccaggatggaataggacagaggcaaacagtggttcgaacccttaacgcaacaggagaagaaattatccagcaatctagcaagacggatgcaagtattttacaagaaaagcttggttctcttaatctcagatggcaagaagtttgtaaacagctctctgatcgtaagaaaagacttgaagaaacgcttgaacgtctgcaggaattgcaggaggcaacagatgaactcgacctgaaattgagacaagctgaggttattaaaggttcctggcaacctgttggtgacctccttatcgacagtcttcaagaccatttagagaaagttaaggcgctccgtggagagattgctccactgaaagagaatgtttcacacgtaaatgacttggctagacaactaactacacttggtattcaattatccccatataatctgtcaacattagaggatctcaatactcgatggaaactcttgcaggtggccgttgaggacagagttcgtcaacttcacgaggcacatcgagatttcggaccagcttcgcagcattttcttagcacgtcagtgcaaggaccatgggagcgagctataagtccaaataaggtgccatactacattaatcatgagacgcaaaccacctgttgggatcacccaaagatgactgaactatatcaatctcttgctgatttaaacaacgttcgattcagtgcatatcgtactgccatgaaacttagacgcctacagaaagcattatgtcttgacttgttgtcactctcagcggcctgtgacgctcttgatcaacataatttaaaacaaaacgatcaaccgatggacatcctacagattatcaactgcctaactacgatatacgatagacttgaacaagaacataataaccttgttaatgttccattatgtgtagatatgtgtctgaactggctactaaatgtgtacgacactggacgaacaggccgtatccgcgtgctgtcgtttaaaactggtatcatttcactctgcaaggctcatctagaagataagtaccgatatctatttaagcaagttgcttcgtcaacaggtttctgtgaccaacgacgtttaggattactcctccatgattctatacaaattccacggcaattgggagaagtagcctccttcggtggttctaacatagaaccatccgttcgttcgtgctttcaatttgcaaacaataagccagagattgaggctgccttattcctggactggatgcgactggagccacagtccatggtttggcttcccgtgcttcatagagtagcagcggcggaaacagcaaaacatcaggctaaatgtaatatttgtaaggagtgtcccataatcggatttcgatatagatctttgaagcacttcaattatgatatttgtcaaagttgcttcttctccggaagagtggctaaaggacataaaatgcattaccccatggtggaatattgcactcctactactagcggcgaagacgtaagagatttcgctaaggtcctcaagaacaagttcagaacaaagcgctatttcgctaaacatccacgtatgggatatcttccggttcagactgtgttggagggagataacatggagactgatacaatg

SEQ ID NO: 251388 - DNA, 3432 bp, synthetic construct
  misc_feature 1..3432: note = Description of Artificial Sequence: Synthetic coding sequence
  source 1..3432: mol_type = other DNA
atgttatggtgggaggaggtggaggactgctacgagagggaggacgttcaaaagaagacattcactaagtgggtcaatgcccagttctcaaaatttggaaagcagcatatcgagaaccttttcagtgatctgcaagatggccgaaggcttcttgacctgctcgaagggctgaccgggcaaaagcttccgaaggaaaaagggagcacccgcgtccacgccttgaataatgtcaataaggcgttgagagtcttgcagaacaataacgttgacctcgtcaatatcggctccacggatatcgtggatggcaatcacaaactcaccctcggtctcatttggaatattatactccactggcaggtgaaaaatgtgatgaagaacattatggcagggctgcagcaaactaatagtgaaaagatacttctttcatgggtgcggcaaagtacaagaaactatccccaggttaacgttatcaatttcactacctcatggtccgatggtctcgccttgaatgccctgatacacagccatcggccggatctgttcgattggaactccgttgtctgtcagcagtcagccacacagagacttgagcatgcttttaatatcgccaggtatcagttggggatcgagaaactactggatcctgaggatgttgacacaacttatcctgataaaaagtcaatattgatgtacattacatcactcttccaggtgcttcctcagcaggtgtcaatcgaagccatccaggaggtggagatgttgccaagacctccaaaagtcaccaaggaagagcactttcagcttcaccatcagatgcactattctcagcagattaccgtgagcctggcccagggatacgaaagaaccagcagcccgaagccaagattcaagtcttacgcttatactcaagccgcatatgtgactacctccgatccaacccggagtccattcccaagtcagcatcttgaagcaccagaggacaagtccttcggtagcagcctcatggaaagcgaggtgaatctggatcgctaccagacagccttggaggaagtactatcctggctgttgagtgctgaggatacgctacaggctcaaggcgaaatttccaacgatgtggaagtcgtgaaggatcaattccacacccatgaaggctatatgatggacttgactgcacatcagggcagggttgggaatatactccaactgggcagtaagttgataggtacaggcaagctttctgaagacgaagagaccgaagtgcaggagcaaatgaacctgctaaattcacggtgggagtgtctgcgggtggcctctatggagaaacaatccaatttgcacagagagatttcctacgtacctagcacttatcttacagagataacccatgtttcacaggctctcctggaggtggaacagctgctaaatgccccagacctttgcgccaaagactttgaggacttattcaaacaggaggaaagcctcaagaacattaaggatagtcttcagcagtcatctgggagaattgatataattcattccaaaaaaacggccgctctccagtccgcgaccccggttgagagagtcaagctgcaggaggccctgagccagcttgacttccagtgggagaaggttaacaagatgtacaaggatcgccagggcaggttcgacagatcagttgagaagtggaggcgctttcattacgatatcaagatatttaatcagtggctcactgaggccgagcagttcctgagaaagacacagattcctgagaactgggagcatgctaagtataagtggtatctgaaagaactgcaggacggaataggacagaggcagacggtcgttcgaacgctcaacgcgacgggcgaggaaatcattcagcagtcttcaaagacagacgcctccattttacaagaaaagctgggatcattaaacctcaggtggcaagaagtgtgtaagcaattatcagataggaagaaacgactggaagaaaccttggaaaggctgcaggagctccaggaggcgacggacgagctagatttgaagctgaggcaggctgaggtgattaaaggaagctggcagccggtgggcgacctacttatcgacagcctccaggatcatctggagaaagttaaagctcttcgaggagaaattgctcccctgaaggagaacgtgagccatgttaacgacctcgcaaggcagctgacaacactgggcattcagcttagtccatacaacctctcaactctggaggatctcaataccaggtggaaacttctccaggtggcagtcgaagacagggtgcgtcaactgcacgaggcgcacagggattttggccccgcttctcagcatttcctgtccacaagcgttcagggaccgtgggaacgagcgattagtcctaacaaggtgccgtattatatcaatcacgaaactcagaccacgtgctgggaccatccaaagatgactgaactgtaccagtcgctggctgatctgaataatgtgcggttttcagcctaccgcacagctatgaagctccgccgactgcaaaaagcactctgtctggatctgttgtccctcagtgccgcttgtgacgcactggaccaacataatctcaaacaaaacgaccagccgatggatattctgcagataattaattgcctgacaacaatctacgatagattagaacaagagcacaataacctggttaacgtaccattgtgtgtcgacatgtgcctaaactggctcttaaacgtatatgacaccggcagaaccggccgtatccgcgtgttatctttcaaaaccggtattatctctctctgtaaggctcatctcgaggacaaatatcggtatctgttcaagcaggtcgcaagttcaaccggattttgcgaccagaggaggctggggctcctcctgcacgactccatccagatcccccggcagctcggcgaggtcgcctccttcggagggtccaatatcgaaccctctgtccgttcttgttttcaattcgctaacaacaagcctgaaattgaagccgccctcttcctagactggatgcgcctggagccccagagcatggtatggctcccggtactccaccgagtcgctgctgccgagaccgcaaagcaccaggccaagtgcaatatctgtaaggagtgccctatcataggttttcgataccgctcactgaagcacttcaactatgatatttgtcaatcttgctttttctcaggacgcgtcgctaaaggacataaaatgcactatccaatggtggagtactgcacccctacaacctcaggtgaagacgttcgcgatttcgctaaagtgttgaagaacaaattcaggacgaagcgttatttcgcaaaacaccccaggatgggatatctgcccgtccagaccgtgctcgagggtgataatatggagacagatacgatg

SEQ ID NO: 251389 - DNA, 3432 bp, synthetic construct
  misc_feature 1..3432: note = Description of Artificial Sequence: Synthetic coding sequence
  source 1..3432: mol_type = other DNA
atgctgtggtgggaggaggtggaggactgctacgaacgggaggacgttcaaaagaaaaccttcactaagtgggtgaacgcacaattctcaaagtttggaaaacagcacatcgagaaccttttcagcgacctgcaagacggccgaaggctcctggatcttctggagggattgactggccagaagttgcctaaggagaaaggatccacccgggtgcatgctttgaacaatgtgaacaaggcgctgcgggtcctccagaacaataatgtggatctggtgaacatcggctccaccgacatcgtggacggaaaccacaagctcaccctcggacttatctggaacatcatcctgcactggcaggtgaagaacgtgatgaagaatatcatggctggacttcaacagacgaactccgaaaagatcctcctgtcatgggtgagacagtcgactcggaattacccccaggtgaacgtgatcaacttcactacttcatggtcggacggactggctctgaacgccctcatccacagccaccgccccgacctgttcgactggaactcagtggtgtgccagcagagcgcaacccaacggctcgagcatgcatttaacatcgcccggtaccaactgggaatcgaaaagctgctggacccagaggatgtagacactacctacccggataagaagtccattctcatgtacattacttccctgttccaagtattgccacaacaagtctcgattgaggccatccaggaggtcgaaatgctgccacgcccgccgaaggtcacgaaggaagaacacttccagctgcaccaccaaatgcattacagccaacagatcaccgtgagtctggcccaaggctacgaacggacctcctcaccgaagcctcggtttaagtcctacgcatatactcaggcagcctacgtcactacctcggaccctactaggtccccgttcccttcccagcatctggaagctccagaagataagtcctttggatcgtcgctcatggaatcggaggtgaatctcgaccgctatcagaccgcgcttgaagaagtgctgtcctggcttctctccgcggaggacactttgcaggcacagggagaaatcagcaatgacgtggaagtggtgaaagatcagtttcacacccatgaggggtatatgatggacctcaccgcacatcagggacgggtgggaaacattctccagttgggttctaaactgatcggaactggtaagctgtcagaggatgaagaaaccgaagtgcaggagcagatgaatctccttaattcgaggtgggaatgcttgagagtcgccagcatggagaagcagtcaaatctccaccgcgaaatctcctacgttccatcgacttatctgaccgaaatcacccacgtcagccaagcccttctcgaagttgagcaattgcttaatgcccctgatctctgtgccaaggatttcgaagatctcttcaagcaggaagagtcacttaagaacatcaaggatagcttgcagcagtcgtctgggcgcatagacatcattcactcaaaaaagaccgcggccctgcaatcagcgaccccagtcgaacgcgtgaagctccaagaagcgctgagccagctcgacttccagtgggaaaaagtgaacaagatgtacaaggatagacaaggacggttcgacaggtcggtggagaaatggagacgcttccactacgacatcaagatcttcaatcagtggctcactgaggcggaacagttcctgcgcaagacccagatcccggaaaactgggagcacgccaagtacaagtggtacctcaaagaactgcaagatggaatcgggcaacggcagactgtcgtgcggactctgaacgccactggagaggaaatcatccaacagagctctaagaccgacgcctccatcctccaggagaagctgggttccctgaacctgcggtggcaggaagtgtgcaaacagctctccgacaggaagaaacgcctggaagaaaccctcgagcggttgcaggagctccaagaggccaccgacgagctggacctgaagctgagacaggcggaggtgatcaaggggtcgtggcaaccagtcggtgacctgctgatcgattcactgcaggatcatttggagaaggtcaaggccctccgtggagaaatcgccccgcttaaggaaaatgtgagccacgtgaatgaccttgcacggcaactcaccactctcggaatccaattgtcgccatataacctgtcaactcttgaggatctgaataccaggtggaagctgctgcaagtcgcggtggaggaccgggtccggcaactgcacgaagctcaccgcgactttggacctgcgtcccagcattttctgtcaacttcagtgcagggaccatgggaaagggcaatctccccaaacaaggtgccgtactacatcaatcacgaaacccagaccacctgctgggaccatccgaagatgactgagctgtaccagtccctcgcagatcttaacaacgtgaggttcagcgcttaccgcactgccatgaaactgcggcggctgcagaaggcactgtgtttggatcttctctcgctctccgcggcttgtgatgcactggatcagcataacctgaagcagaacgaccagccgatggacatcctgcagatcattaactgcttgaccaccatctacgatcgcctggagcaggaacacaataacctggtgaatgtgccgctgtgcgtcgatatgtgtctcaactggctgttgaacgtctacgataccgggcggactggacgtattcgcgtcctgtcgttcaagaccggaatcatttccctttgcaaggcccacctcgaggacaaatatcgctacctctttaagcaggtggcatcttcgaccggattctgtgaccaacgccggctgggattgttgctgcacgatagcatccagatcccgcggcaactgggggaggtggcgtcctttggaggctcgaacatagaaccttctgtgcgctcgtgcttccaatttgcaaacaacaaaccagagatcgaagctgccctgtttctcgattggatgagactggagccgcagtcaatggtgtggctcccagtgttgcatagagtggcagccgcagagactgctaaacaccaagccaagtgtaacatttgcaaggagtgcccgattatcggtttccggtacaggtcactgaagcactttaactacgatatctgccaatcgtgcttcttttcaggccgggtggcgaagggtcacaagatgcattaccctatggtggaatactgtacgccgactacctctggagaagatgtgagagatttcgccaaagtgctgaagaacaagttcagaaccaagcgctactttgccaagcatcccagaatgggatacctgcccgtgcaaacggtgcttgaaggagacaacatggaaaccgacactatg

SEQ ID NO: 251390 - DNA, 3432 bp, synthetic construct
  misc_feature 1..3432: note = Description of Artificial Sequence: Synthetic coding sequence
  source 1..3432: mol_type = other DNA
atgctttggtgggaggaggtggaagattgttacgaacgcgaagatgtgcaaaagaaaacttttaccaagtgggtgaacgcccaattctccaagttcggtaagcagcacatagaaaatctcttctcggatcttcaggacggacgccgactcctggatctccttgaagggctgactggacaaaaactgcctaaagaaaaaggatctaccagagtgcacgcgctcaataatgtgaacaaggcactgagagtgcttcagaataacaacgtcgacctggtgaacattgggtcgactgatatcgtcgacggcaaccataagctgactctcgggctgatctggaacattatactgcattggcaagtcaaaaacgtcatgaagaacataatggcaggactgcaacaaactaactccgagaagatccttctttcatgggtccgccaatcgacccggaattaccctcaagtgaatgtgatcaactttactacttcctggtccgatggtcttgcgctgaacgccctgattcattcccacagaccagaccttttcgattggaatagcgtcgtgtgtcaacagtcagcaacgcaacgccttgagcacgccttcaatatcgcacggtaccaactcggaattgagaagttgctcgacccagaagatgtggacaccacttaccccgacaagaaatcaatcttgatgtacataacttcgctttttcaggttctcccacagcaagtctcgattgaagcaattcaagaagtggaaatgcttcctagacccccaaaagtaaccaaggaagaacactttcagctgcatcatcaaatgcactactcccaacagatcaccgtctcgctggcccagggatacgagaggacctcgtccccaaaacccagatttaagtcatacgcatacactcaagcagcctacgtcactacctcggaccctaccagatcgccttttccttctcagcacctggaagcacctgaggataagagcttcggttcgtcgctcatggaatcagaagtgaacctggacaggtaccaaaccgcactggaagaggtgctttcgtggcttctcagcgcagaggatacgttgcaagcccaaggggagatctcgaacgacgttgaggtggtcaaggaccagttccacactcatgagggatacatgatggatttgaccgcacatcagggtagagtgggaaacattctccaacttggcagcaagctgattggtactggtaaactctcggaagatgaagagactgaagtccaagaacaaatgaatctcctgaactccagatgggaatgtctgcgggtcgcgtccatggaaaagcaatccaacctgcaccgtgaaatttcatacgtgccatcgacttacctcaccgagatcacgcatgttagccaggccctcctggaggtggagcaattgttgaacgcacccgatctgtgtgctaaggattttgaggaccttttcaagcaggaagagtcactgaagaatatcaaggactcgctgcaacaatcgtcaggacggattgatatcattcattcgaagaaaaccgctgcgcttcaatcggccaccccggtcgaacgggtgaaattgcaggaggccctgagccagctggacttccaatgggaaaaggttaacaaaatgtacaaggatcgccaaggccgatttgatcgatccgtggaaaagtggcgcaggtttcattatgacatcaaaatctttaatcaatggctcaccgaggcagaacaatttctcagaaagacgcagataccagaaaattgggagcacgccaagtacaaatggtacctgaaagaactccaagatgggatcggtcaacgccaaaccgttgtgagaaccctgaacgcaaccggagaagagattatccaacaatcaagcaagacggacgcctcaatcttgcaggaaaaacttggttcactcaatctgcgctggcaagaggtctgcaagcaactctccgacagaaagaagaggcttgaggaaaccctggagcggctgcaagaactgcaagaagcaactgacgaactcgaccttaaactgagacaagccgaggtcataaagggatcgtggcaacctgtgggagacttgctcatagacagccttcaagatcacctggagaaggtaaaagccctgcggggtgagatcgcaccactgaaggaaaacgtgtcacacgtcaacgatcttgcacggcagctgactaccctgggcattcagctttcgccatataacttgtcgactctggaagatctgaacacgcggtggaagctgttgcaagtggcggtggaggaccgcgtgagacaactgcatgaagcacaccgcgatttcggtcctgcaagtcaacattttctttccacctccgtgcagggtccttgggagagagccatctcacctaacaaagtgccctattacattaatcatgagactcagaccacttgctgggaccatccaaaaatgaccgagctgtatcaatcgcttgctgatcttaacaacgtgagatttagcgcatatagaaccgcaatgaagctcagaaggcttcagaaggccctctgccttgatctcctgtcgctttcagccgcatgtgatgcacttgatcagcacaaccttaagcaaaacgatcaacctatggacatcctccagataatcaactgtctcactactatctacgatcgcctggaacaggagcataacaatcttgtcaacgtgcccctgtgcgtggatatgtgtctgaattggctgcttaacgtctacgacaccggtcgtactggaagaattagagtgctctccttcaagactggcattatctcgctttgtaaggctcatctcgaagataagtatcggtacctgtttaagcaagtggcttcctcgactggattttgtgatcagcggaggctcggacttcttctgcatgattccatacaaatacctagacagctgggagaagtcgcatcgtttggcggatccaatatagaaccatcggttagatcgtgctttcaattcgctaacaacaagccggaaatagaagcagcgctttttctggactggatgcgtctggaaccccaatctatggtgtggttgcctgtgctgcacagggttgcagcagcagaaaccgccaagcatcaggcgaagtgcaatatctgcaaagaatgtcccattatcggatttagatacagatcgctcaaacatttcaactacgacatttgtcagtcgtgcttcttttcaggacgcgtcgctaagggacacaaaatgcactaccctatggtcgaatactgtaccccgaccacctccggcgaggatgtccgtgacttcgcaaaagtgcttaagaacaagtttagaaccaagcggtactttgcgaaacatcccaggatggggtatctgccggtgcagaccgtgctggagggggataacatggagactgacaccatg

SEQ ID NO: 251391 - DNA, 3432 bp, synthetic construct
  misc_feature 1..3432: note = Description of Artificial Sequence: Synthetic coding sequence
  source 1..3432: mol_type = other DNA
atgctgtggtgggaggaggtagaggactgctacgaaagggaagacgtccaaaagaagactttcactaaatgggtgaatgctcaattctcgaagtttggtaagcagcacatcgagaatctgtttagcgatctccaagatggaagacggctgctggatctcttagagggcttgactgggcagaagctcccaaaagaaaaaggatccacacgcgtgcacgcattgaacaacgtcaataaggccctccgtgtgcttcagaataataatgtagatctggtgaacatcggcagcaccgacatcgtcgatggcaaccacaaacttacgctcggcctcatttggaacattatcctgcactggcaggtaaaaaatgtcatgaaaaacatcatggccgggctacaacagaccaactcagagaaaatcctcctttcctgggttcggcagtccactaggaattacccccaggtgaacgtgattaacttcactacgtcatggtctgacggtctcgccctgaacgccctgattcattcacatagacctgatctgttcgattggaattcagtggtatgtcagcagagtgccacacagcgattggaacacgcgtttaacatcgctcgttatcagcttggaatcgagaaactcctggacccagaagatgtagacacaacataccccgacaagaagagcattcttatgtacatcacaagtctgttccaggtcttgccacaacaggtatcaatcgaggcaattcaggaagtggagatgctcccgcgccctccaaaggtgactaaggaggagcacttccagctccatcatcagatgcattactcccaacagattaccgtctcactggcccaggggtatgagaggacctcatctccaaaaccccggttcaaatcctatgcatacacccaggcagcctacgtgactacatcagacccgactcgtagcccattcccttcacagcacctggaggcgcccgaagacaagtccttcggatcatccctgatggagagcgaagtcaacctggatcgctaccagactgccctggaggaggtgctgagctggctgctgtcagccgaagatacgttacaggctcagggcgaaatatctaacgacgttgaggtggtcaaagatcagtttcatactcacgagggttacatgatggacctgacggcacatcagggtcgagtgggcaacatccttcagctgggaagcaagctgattggtaccgggaaactgtcagaggatgaagagaccgaagtccaggagcagatgaatctattgaatagtagatgggaatgtctgcgggtagctagcatggaaaagcagtctaacctacacagagagataagttatgtgccaagcacttacctgaccgaaatcacgcatgtgtctcaggcgctgttagaggtggagcagttattgaacgcgccagatctgtgcgctaaagattttgaggacctgtttaaacaggaagaatctctcaagaacattaaggatagcttgcagcagtcatcagggaggattgacatcatccacagcaaaaaaacggccgcccttcagagcgcgacacccgtcgagagggttaagctgcaagaggccttgtcacaactagatttccagtgggaaaaggtcaataagatgtataaggaccgccaagggcggttcgaccgaagtgtcgaaaaatggagacgattccactacgacatcaagatatttaaccaatggctgactgaagctgagcagttcttaaggaagacgcagatccctgagaactgggagcacgccaagtataagtggtatctgaaggagctgcaagacgggatcggacaaagacagactgtggtgcggaccctgaatgctactggggaagagatcatccagcagtcctccaagaccgatgcatccatcttgcaggaaaaactaggatccctaaatctccgctggcaggaagtctgcaagcaactttcagaccggaagaagaggcttgaggaaacactagagaggctgcaagagctgcaggaggccactgacgaattggacttaaagctccgacaggcagaggtcatcaaaggaagctggcaaccagtgggggaccttctaatagattccctgcaggatcatctagaaaaggtaaaggccctccggggggaaatcgcacctctcaaagaaaatgtgagccatgtaaatgacttggcccgacagctgacaactctcggaatccagctgtcgccatataatctgtcaacgcttgaggatctgaacacgcgctggaagcttctgcaggtggcggtggaagatcgggtgcggcagctgcacgaggcacaccgagatttcgggccagcctcacagcatttcctgtcaacttctgtccagggaccttgggagagggccattagcccaaacaaagtaccctattatatcaaccacgagacacaaaccacatgctgggaccatccgaagatgactgaactgtatcagtccctcgctgacctaaataacgtaagattcagcgcttatcggacggcgatgaagctgagacgcttacaaaaggcactgtgcctggacctgctcagcctgtccgctgcctgcgacgccctcgatcagcataatctgaagcagaacgaccagcccatggacattctgcagattatcaactgcttgaccaccatctatgatagactggaacaagagcacaataacctcgttaatgtccccttgtgcgtggacatgtgcctcaactggctcctgaacgtgtatgatactggtcggaccggccggatcagagtattgtctttcaaaacaggcatcatttctctctgcaaagcccacctcgaagataaataccggtatctctttaagcaggttgcgtcctcaactggattctgtgaccagcggagactcggtctgctgcttcacgactctattcagattccaaggcagctcggggaggtggcatcatttggcggctctaacatagaaccatcagttcggagctgcttccagtttgccaacaacaagccggagatcgaggccgcactgttcctggattggatgaggcttgaaccacagtcaatggtgtggcttccagttctgcacagagtggctgcagctgagaccgctaaacatcaggcaaaatgtaatatctgtaaagagtgtccaataatcggatttaggtacaggtccctcaaacatttcaattatgatatttgtcagtcctgtttcttctcagggagggtggcaaaaggtcataaaatgcattacccgatggttgagtattgtacccccactacttccggcgaggatgtgagggactttgccaaggttctgaagaacaaatttaggacgaagaggtactttgccaaacacccgcggatgggctacctgccggtccagacagtcctggagggagataatatggagaccgacaccatg

SEQ ID NO: 251392 - DNA, 3432 bp, synthetic construct
  misc_feature 1..3432: note = Description of Artificial Sequence: Synthetic coding sequence
  source 1..3432: mol_type = other DNA
atgctgtggtgggaagaagtggaggattgctatgaacgggaagacgttcagaaaaaaacgttcacaaaatgggtcaacgcccagttctcaaagttcggcaagcagcatatcgaaaacctattcagcgacttgcaggatggaagacgcctcctagatctccttgagggcttgaccggacagaagctgccgaaggaaaagggtagcacaagggtgcatgcacttaacaatgtcaataaggccctgcgggtactgcagaataataatgtggacttggtgaacataggcagtactgatattgtggacggcaaccataaattgaccctcggattgatttggaatataatattgcactggcaggttaagaacgtgatgaaaaatataatggcaggactccagcagacaaacagcgaaaaaattctgctaagctgggtccggcagtcaacgcggaactatccccaggtgaatgtgattaactttacaactagttggtccgatgggctagccctcaacgctttgattcacagccaccgaccggacctgtttgactggaatagcgtggtgtgtcaacagtctgctacgcaacgtctggaacacgccttcaacatagcacggtatcagctgggcatagagaaacttctggacccagaggatgttgataccacataccccgataagaagtctatcctgatgtatatcacgtctctgttccaggttctgccacaacaggttagtatcgaagccattcaagaggttgaaatgcttccacgaccccccaaagttacgaaagaagaacattttcagctgcatcaccaaatgcactacagtcagcagataaccgtgagcttagcgcagggctacgagaggacctcgagccccaagccccgattcaagtcttatgcctatacacaagccgcttatgtgacaacctcagaccccacacgcagcccatttccaagccagcacttggaagcccccgaggacaaatcgttcggtagtagcctgatggagagtgaggtcaatctggataggtaccagacggctttagaggaagtgctgtcttggttgctgtccgcggaggacaccttacaggcccagggtgagatttctaatgatgtggaagtggtcaaggaccagtttcacacgcacgaggggtacatgatggatctgacagcgcatcagggacgggtcgggaacatcctacaactcggctccaaactgatcggcaccggcaaactatcagaggatgaggaaaccgaagttcaggagcagatgaatttgttgaactccagatgggagtgtttgcgtgtggccagcatggaaaagcaatctaaccttcaccgcgagatatcctatgtcccttcaacctacctcactgaaataacccatgtctcccaggccctactggaagtcgagcaactcctgaatgcccccgacctgtgcgcaaaagatttcgaagatctgtttaagcaggaggagtccctcaagaacatcaaagatagtctccagcagtcttctggtaggattgatattatccatagcaaaaagacagccgccttacagtctgccacccctgtggagagagtcaaacttcaggaagctctgtctcagttagatttccagtgggagaaagtgaataagatgtacaaggataggcaaggcagatttgatcgtagcgtggaaaaatggaggagatttcactatgacattaagatttttaaccagtggcttactgaggctgagcaattcctccgaaagacacagatccccgagaactgggagcacgctaaatacaagtggtatctcaaggagttgcaggacggcatcggccagaggcaaaccgtggtcaggaccctcaatgctaccggcgaggagatcatacagcagtcaagtaagacagacgcaagcatattgcaagagaagctgggttccctgaacctgcgttggcaggaggtgtgtaaacagctcagtgatcggaagaaaagactggaggagaccctggaacggctgcaggagttgcaggaggcgaccgatgagctggacttgaagctgcgccaggccgaagtgattaaaggtagctggcagcctgtaggcgacctgttaatcgatagccttcaggatcatctagaaaaggtaaaagctttgcgcggcgaaatcgctccactaaaggaaaatgtatctcacgtgaacgacctcgcaaggcagctaactaccctgggcatccagcttagcccatataacctcagcacactggaagaccttaacacccgctggaaactgctccaagtcgccgttgaagacagagtacggcagcttcacgaagcccaccgagatttcggtccagccagtcaacattttctgtctaccagcgtccagggaccttgggaaagggcaatatctcctaacaaggtgccatactatatcaatcacgagacccagactacatgttgggaccaccccaagatgactgagctgtatcagtctctggccgatctgaacaatgtgagattcagtgcataccgcacagctatgaagctgcggcgattacaaaaggccctgtgtctggatctgctctcactctcagcagcctgcgatgctttggatcaacataatcttaagcaaaatgaccagccgatggatatactccaaataattaactgtttaacgacaatttacgatcgcctggaacaggagcataataaccttgtcaacgtccctctctgtgtagacatgtgtctaaactggctgcttaatgtttacgacaccgggaggacgggccgcatccgagtcctgtcgttcaagactggcataatctctctgtgcaaggctcatctcgaggacaaatatagatatctgtttaagcaggtcgcctctagcaccggcttttgtgaccagagaagactcggccttcttcttcacgacagcattcaaatccctaggcagcttggcgaggtcgcaagctttggcgggtcaaatatcgagccttctgtgagatcctgttttcagttcgctaacaataaacccgagatcgaggccgcccttttcctagattggatgaggcttgagccccagtccatggtgtggctcccggttttacatcgagtcgcggcagcggagaccgcaaaacaccaggctaagtgtaatatctgcaaggaatgtcccatcataggatttaggtacaggagcttgaagcacttcaactacgacatctgccagagctgtttcttttctggaagggtggccaaggggcacaagatgcactatcctatggtcgagtactgtaccccaacaaccagcggcgaggatgttcgcgactttgcgaaggtactcaaaaataagtttaggacaaaaagatatttcgccaaacaccccaggatgggatatttgcccgtacagaccgttctagaaggggataatatggaaactgacacaatg

SEQ ID NO: 251393 - DNA, 3432 bp, synthetic construct
  misc_feature 1..3432: note = Description of Artificial Sequence: Synthetic coding sequence
  source 1..3432: mol_type = other DNA
atgctgtggtgggaagaagtcgaggactgttacgagcgcgaagatgtgcagaaaaagacttttactaagtgggtgaatgcgcagttctcaaaattcggaaaacagcatattgagaacctcttcagcgacctgcaggacggcagacgcctcctcgacctgcttgagggtcttacgggacagaaactgccgaaggagaaagggtctacccgcgttcacgcgctgaacaacgtgaataaggcacttcgcgtgttgcagaacaataacgtcgacctggttaacatcggttcaaccgatatcgtggacggaaaccataagctgactctggggctcatctggaacatcatcctccattggcaagtgaagaacgtgatgaagaacatcatggctggactgcagcagactaattccgagaagatcctgctcagttgggtccgccaaagcacccgcaactaccctcaggtgaatgtgattaacttcactacctcctggtcagatggcctggccctgaatgcgctgatccactcccaccgcccagatctgttcgactggaattccgtggtgtgccagcaatcggctacccagcgcctggagcatgccttcaacatcgctagataccaactcggaatcgagaaacttctcgatccggaggacgtcgacaccacttacccggacaaaaagagcatcctgatgtacattacttcgctgtttcaggtgctcccccagcaggtgtcaattgaagcgatccaggaggtggagatgctgcctcgccctcctaaggttaccaaggaagaacatttccagttgcatcaccagatgcactactctcagcagatcaccgtctccctcgcacagggctacgagagaacttcaagccccaagcctcgcttcaaaagctacgcgtacacccaagcagcctacgtgacgacttcggacccaactagaagcccgtttccaagccagcatcttgaggctcccgaggacaagtccttcggatcctcactcatggaatccgaggttaatctggatcggtaccaaactgctcttgaagaggtgctctcatggttgctcagcgcggaggatactctccaggcccagggcgaaatctccaatgacgtcgaggtggtgaaagatcagttccatacccacgagggttacatgatggacctgactgctcatcaggggcgcgtgggaaacatccttcagctgggctcaaagctgatcggcactggtaagctctctgaggatgaggaaactgaagtgcaggagcaaatgaaccttttgaacagccgctgggaatgcttgagagtggcgtcgatggagaagcagagcaatcttcatagggaaatttcatacgtgccgtcgacctacctgactgaaatcacgcatgtgtcccaggccctcctggaggtcgagcagctccttaacgccccagatctgtgcgcaaaggactttgaggatctcttcaaacaggaagaatccttgaagaacattaaagatagcctccaacaatcgtccggaagaattgacatcatacactcaaagaaaactgccgccctgcaaagcgccaccccggtggaacgggtgaaactgcaagaggcccttagccaattggacttccaatgggagaaggtgaacaagatgtacaaagacagacaaggccggttcgatagatccgtggagaaatggcggcgcttccactacgatatcaaaatcttcaaccaatggctgacggaggccgagcaattcctgcgcaagacgcagatccccgagaattgggagcatgcaaagtacaagtggtatctcaaggaattgcaggacggaattggtcaacgccagaccgtggtccgcaccttgaacgccaccggcgaagagatcatccagcagtcctcgaaaaccgacgcctcaatcctccaagaaaagttgggatcgctgaacttgcggtggcaggaagtgtgcaagcaactctcggacaggaagaagcggctcgaggagactctcgaacgcctccaggaactccaggaagcgaccgacgagctggacctcaagctccggcaggcggaagtgatcaaaggatcgtggcagcccgtgggggacctgctgattgactccttgcaggaccatctggaaaaggtgaaggcactccggggggagatcgcaccactgaaggaaaatgtcagccacgtgaatgatctggctcggcagctcactactttgggcatccagctgtccccatataacctgtccactctcgaggatctgaatactcgctggaaattgctgcaggtcgcagtcgaggatagagtgagacagctgcacgaagcccatcgagactttggcccggcttcgcaacatttcctctcgacctccgtgcaaggaccgtgggaacgggctatctcgcccaacaaggtgccatactacatcaaccatgaaactcagaccacttgttgggatcaccccaaaatgaccgagctgtaccaatctctggctgacctgaacaacgttcgattctcggcatatcgtaccgccatgaagctgcgccgactgcagaaggccctgtgtttggatctgctctccctgtctgcagcgtgcgacgcgctggaccagcacaatctgaagcagaacgaccagccaatggatatcctgcaaatcataaactgcctgaccaccatctacgatagactggaacaagaacacaataatctggtgaacgtgccgctctgcgtcgacatgtgcctgaattggttgcttaatgtgtacgacaccggtcggaccgggcgcatccgagtgctgagcttcaaaactggtatcatcagcttgtgcaaagcgcacctggaggacaaataccgctatctcttcaagcaggtggcttcatcaactggattctgcgaccagagaagattgggcctgctcctgcacgactcaatccagatcccaagacagttgggagaagtcgcgtcattcgggggatccaacatcgaaccgtcggttcgctcgtgcttccagttcgccaacaataagccggagatcgaggcggcactcttcctggattggatgagacttgaaccccaatccatggtctggctgccggttctccatcgcgtggcggccgccgaaactgcaaagcaccaggccaagtgtaatatctgcaaggagtgtccgatcattggattccgctacagatccctgaagcacttcaattacgatatctgccagtcatgctttttctccggacgcgtggccaaaggacacaaaatgcattatcctatggtggagtattgcaccccgacgacttcgggagaggatgtgagagacttcgcgaaggtgctgaagaacaagtttcgaactaaacgctactttgctaagcaccccaggatggggtacctcccggtccaaaccgtgctggagggggacaacatggaaactgatacgatg

SEQ ID NO: 251394 - DNA, 3432 bp, synthetic construct
  misc_feature 1..3432: note = Description of Artificial Sequence: Synthetic coding sequence
  source 1..3432: mol_type = other DNA
atgttgtggtgggaagaggtggaggattgttacgaacgggaggacgtgcagaaaaaaacctttaccaaatgggtgaacgcgcagttttccaagtttggaaagcagcacatcgaaaatctgtttagcgacctgcaagacggcagaaggctgctggacctgcttgaaggtttgacaggccaaaaactgccgaaggaaaaaggatctactcgcgttcatgctctgaataatgtgaacaaggctttaagagtgctgcagaacaacaacgtggatctggtcaacatcggatcaacagacatcgtagacgggaaccataaacttaccctcggactgatctggaacatcatccttcactggcaggttaaaaatgtgatgaaaaacattatggctggtctgcagcagaccaacagcgaaaagatcctgctcagctgggtgaggcagagtacccgcaactacccacaagtcaacgtcatcaactttacaacttcctggtctgatggcctggctttgaacgctctgattcacagccacaggccagacctttttgactggaatagcgttgtatgccagcaaagtgccacacagaggctagagcacgctttcaacatagcaaggtaccagcttggcatcgaaaaactgcttgatccagaggacgttgacacgacttaccctgacaagaaaagcattttgatgtatatcacctcgctctttcaggtgctcccccagcaagtgtctattgaagctatccaagaagtagagatgcttccaaggcctccgaaagtaactaaggaagaacacttccagttacatcaccagatgcactactctcagcaaattactgtgtctcttgcccaaggctacgaaaggacatcctcccccaaaccaaggtttaagtcttacgcctacacccaggcggcctacgtgactactagcgaccctaccagaagtccgttccccagccaacacctggaagcgcctgaagacaagtccttcgggtcctccctcatggaaagcgaagtaaacctggatcgctaccaaacggcacttgaggaagtcctgagctggcttttgtcagccgaggacactctccaggcccagggagaaatctcgaatgatgtcgaagtcgtgaaagatcaatttcacacccatgagggatacatgatggatctcacagctcatcagggccgagtgggcaacatcctccaacttggtagtaagctgattggaaccggaaaactgtctgaggacgaggaaaccgaggtccaggagcagatgaatctgcttaatagtaggtgggagtgcttgagagtggcttcaatggaaaaacagagcaacttgcaccgagagatatcttatgtgccctccacctacctgacagagatcacacacgtgagccaagcattgctggaagtggagcagctgcttaacgctcctgatttgtgcgcgaaggacttcgaggacctgtttaagcaggaagagtctctgaagaatatcaaggatagtctccaacagagtagtggacggattgatatcatccacagtaagaaaactgcagcccttcaatctgccaccccagtggaacgggtgaagctgcaggaggccctgagtcagctggactttcagtgggagaaagtcaacaaaatgtataaggacagacaaggccgcttcgataggagcgtagagaagtggcgcagatttcactatgatatcaagatcttcaaccaatggctgacagaggcggagcagttcttgaggaaaacccagatccctgagaactgggagcacgcaaaatacaaatggtacctgaaggagctgcaggacggaatcggacaacgccaaaccgtcgtgcgcaccctgaacgctacaggagaggaaattattcagcagtcttcaaagacagacgccagcatcctgcaagaaaagctgggaagcctaaatttgaggtggcaagaggtgtgtaaacagctttcagaccgcaaaaagcgtctggaagagacactggaaagacttcaggaactgcaggaggctaccgatgagttggacctgaagctcagacaagccgaggtgataaaagggagctggcagcccgtcggggacctcttaatcgatagtctccaagatcatttagaaaaggtgaaagctctgaggggggaaatcgccccactgaaagaaaatgtctctcatgtgaacgatctggctagacaattgacaaccctgggaatccagctgtccccatataatctaagcacacttgaggatctgaacaccaggtggaagctgctccaggtcgcagtcgaagacagagtcaggcagttgcacgaggcccatagggattttggcccagcatctcaacatttcttgtctacttccgtgcaaggcccttgggagcgtgcaatatcaccaaataaggttccttactacatcaatcatgagacacagactacatgctgggatcaccctaaaatgacagaactctatcaatcgttggccgaccttaataatgtcaggtttagcgcttaccgcactgctatgaagttaaggcgtttacagaaggctctgtgtctggacttactgtcattatccgcagcttgcgacgctctggatcagcacaacctgaagcagaacgaccagccaatggacattcttcaaattatcaactgccttaccacaatctatgatagattggagcaagaacataacaaccttgtgaacgtgcccctttgtgtggatatgtgtctgaactggctgctcaacgtgtacgacaccggtaggaccggtcggattagggtgctctctttcaaaacaggaattatctctctctgtaaagcccaccttgaggacaaatacaggtacttgtttaaacaggtcgctagctctaccggattctgcgatcagagaagactggggctgcttttgcatgactcaatccaaatccccagacaactgggagaggttgctagctttggaggatcgaacatagagccatccgtgcggagttgtttccagtttgctaacaacaagcccgagatcgaagctgccctctttctggactggatgcgccttgaacctcagtctatggtttggcttcccgtactgcaccgcgtggctgctgctgaaaccgctaaacaccaagctaaatgcaatatttgcaaagagtgtcctattattgggttcaggtacagatctttgaagcattttaactacgacatctgtcagagctgctttttttctgggcgcgtggcaaaagggcacaaaatgcattatccaatggtcgaatattgtacccctaccacttccggggaagacgtgagggactttgcaaaagtcctgaaaaacaagtttagaaccaagcgctatttcgcgaagcacccaagaatgggatacttgccagtgcagactgtgctggagggcgacaacatggagacggataccatg

SEQ ID NO: 251395 - DNA, 3432 bp, synthetic construct
  misc_feature 1..3432: note = Description of Artificial Sequence: Synthetic coding sequence
  source 1..3432: mol_type = other DNA
atgctctggtgggaagaggtcgaagattgttacgaaagggaggatgtccagaagaaaaccttcaccaaatgggtgaatgcacagtttagcaagttcggaaagcagcacatagagaacttgttttcagatctgcaagacggacgacggctgctggatctcttggaaggtcttaccggacagaagctgcctaaagaaaagggttccactagagtccacgctctgaacaatgtcaataaggcactccgtgtgctgcaaaacaacaatgtggatcttgtgaacatcggatccactgacatcgtggatggaaaccacaagttgactcttggtctgatctggaacattatactccattggcaggtgaaaaacgtgatgaagaacattatggcagggcttcagcaaaccaactcagaaaagatccttctgtcgtgggttcgtcagagcacgcgtaactaccctcaagtcaatgtgataaacttcaccacctcgtggtccgatggactcgcactgaacgcactgatccacagccatcgccccgatttgttcgactggaactccgtggtgtgccagcaatccgctacccaaaggcttgagcatgcatttaacatagcacgctaccaacttggaatcgaaaaacttctcgatcccgaagatgttgacaccacttatccagataagaagtcgatattgatgtacataacttcgctctttcaagtcctgccgcaacaggtgtccattgaggctattcaagaagtggaaatgctcccaaggccacccaaggtgactaaagaagaacattttcaactgcatcatcagatgcattacagccaacaaatcactgtgtcattggcccagggctacgagcggacctcatcccctaaaccccgtttcaagtcgtacgcatacacccaagccgcatacgtgacgacttcagatcccactcggtcaccttttccatcgcaacatctcgaagctcccgaggacaagtcctttggttcatcactcatggagagcgaagtcaacctcgatcggtaccagaccgctctggaggaggtgctttcgtggcttctgtccgcagaagataccctccaagcacaaggggagatttcgaacgatgtggaagtggtgaaggaccaatttcatactcatgaaggctacatgatggatctcactgctcatcaaggtagggtcggaaacattcttcaacttgggagcaagctcattggaactggaaaactgtccgaggacgaggaaaccgaagtccaggaacagatgaatctgcttaactcgcgttgggaatgtcttagggttgcatcaatggagaaacagtcaaacctgcaccgcgaaatctcttacgttccctccacctacttgaccgaaattacccatgtcagccaggcacttcttgaggtcgaacagcttctcaacgcgcctgacctgtgtgcaaaggacttcgaagatctcttcaagcaagaggaaagcctcaaaaacataaaggattcgcttcaacagtcgtccggtagaatcgacatcattcactcgaagaaaaccgccgcactgcaatcagccacgccggtggaacgagtcaaacttcaagaagcactcagccaactggatttccaatgggaaaaggtgaacaaaatgtacaaggatagacagggcagatttgaccggtccgtggagaagtggcggcggttccattatgatatcaagatctttaaccaatggctgacggaggccgaacagttcttgagaaagactcaaattccagaaaactgggagcatgcaaagtacaagtggtaccttaaggaactgcaagatgggatcggccagagacaaactgtggtccgcactttgaatgccactggtgaagaaatcattcagcagtcgtcgaaaacggatgcttccatcttgcaagaaaaacttggtagcctgaacttgcggtggcaggaagtctgtaagcagctgagcgatagaaagaaacgacttgaagagactcttgaaaggctgcaggagctgcaagaagcgaccgacgaactggatctgaaactgagacaggcggaggtgataaagggatcgtggcaaccggtgggagatctcctgattgattccctccaagatcaccttgaaaaagtgaaggcacttcgtggtgaaatcgcacctcttaaagagaacgtgtcgcacgttaatgatcttgcgcgacagctcactactctcggaattcagctgtctccctacaatctgtcgactctggaggatcttaatactcgatggaaactgctgcaggtggccgtcgaagatcgtgtccgacaattgcatgaagctcatcgcgacttcgggcctgcatcccagcactttctttcgacctcggtgcaaggtccttgggaacgcgccatctcacctaacaaggttccatactacataaaccatgaaacccaaactacctgttgggaccatcctaagatgacggaactttaccaatcgctggcagatcttaacaacgtgaggtttagcgcataccgcactgctatgaaacttagacggctgcagaaagccctttgtctggatctgctttccctttcggctgcctgcgacgcgctggaccagcacaatctgaagcaaaacgatcagcctatggacattctgcaaatcattaactgcctgactaccatttacgacagacttgagcaagagcataacaatctggtcaacgtcccattgtgtgtggatatgtgcctcaactggctcctcaacgtctacgacaccggaagaaccggtaggatccgcgtcctgagcttcaagaccggaatcatttcactctgcaaggcccatctcgaagataagtaccgatacctcttcaaacaggtggccagctctaccgggttttgcgaccagaggaggcttggccttcttctgcacgattccattcagattcctcggcagctcggagaggtcgctagctttggcggatccaacatcgagccttcagtgcgctcatgctttcagtttgcaaataacaagcctgagatcgaggcagcactttttcttgattggatgcgactggagccacagtcgatggtctggcttccagtgctgcatagggttgccgcagccgagactgctaagcaccaggcaaagtgtaacatttgtaaagaatgcccaatcataggttttagatacaggtcactcaaacatttcaattacgatatttgccagtcgtgcttcttttcgggacgtgtcgcgaagggacataagatgcactaccctatggtggaatactgtacccctacgaccagcggtgaggatgtgcgcgattttgcaaaggtgctgaagaataagtttagaaccaagagatactttgcaaaacacccgagaatgggatacctgccggtgcaaacggtgctcgagggcgacaacatggagactgatactatg

SEQ ID NO: 251396 - DNA, 3432 bp, synthetic construct
  misc_feature 1..3432: note = Description of Artificial Sequence: Synthetic coding sequence
  source 1..3432: mol_type = other DNA
atgctgtggtgggaggaagtggaagattgttacgaacgcgaggatgtgcaaaagaaaacctttactaagtgggtgaacgcacagttttcgaaatttggaaagcagcatatcgaaaaccttttctccgatctgcaagacggtcggcgccttctggaccttcttgagggactgacggggcagaagctcccaaaagagaagggttccactagagttcacgcactgaataacgtaaacaaagccctgcgggtgcttcagaacaacaacgtggatctcgtgaacataggctcgacggatatcgtggacggaaatcataagctgactctgggccttatatggaacataattctccattggcaggtgaaaaacgtcatgaaaaacatcatggcaggactgcagcaaaccaactcggaaaagattcttcttagctgggtccgacagtcaacccgaaactaccctcaggttaacgtcattaactttactactagctggtccgatggacttgcactcaatgcactgatacattcccaccgtccagatctgtttgattggaactccgtggtttgccaacagtcggcaacccagaggctcgagcatgcattcaacattgctcgataccagctgggcattgagaagttgcttgaccctgaagatgtggatactacttaccctgacaagaaatctatccttatgtatatcacctcgctctttcaagtgctgcctcaacaagtgtcgattgaggccatccaagaagtggaaatgctgcccagaccgcccaaggtgactaaagaagaacattttcaactccaccatcaaatgcactattcccaacaaatcactgtatcgctggcgcaggggtacgagcgcacctcatcgccaaagcctcgttttaagtcatacgcgtacactcaagctgcctacgtgaccacctcagatcccactcgcagcccttttccttcccagcatctggaagcgcctgaagataaatcttttggttcctcccttatggaaagcgaagtcaatcttgatcggtaccagacggcgcttgaagaagtccttagctggctgctctcggcagaagataccctgcaagcacagggagagatctcgaacgatgtggaggtggtgaaagatcaatttcatactcatgaagggtacatgatggacctcaccgcccaccaaggaagagtgggaaatatcctccagttgggctccaagctgataggaaccggtaagctgtctgaagatgaggaaaccgaagtccaggaacaaatgaatctgcttaattcgagatgggaatgtctgcgggtggcgagcatggagaaacagtccaatctgcaccgggagatttcatacgtgccttcaacctaccttactgagattactcacgtctcgcaagcacttttggaagttgaacaacttctgaacgcaccagacctttgtgccaaggattttgaagatctgtttaaacaagaagaatcactcaaaaacattaaggattccttgcagcagtcctcgggacggattgacataatccattcgaaaaagactgcggcactgcaaagcgcaacgcccgtcgagcgggtgaaacttcaggaggctctgtcccaactcgattttcaatgggaaaaggtgaataagatgtacaaggatagacaaggcagatttgatcgctccgtggaaaagtggaggagatttcactacgacatcaaaatctttaatcagtggcttacggaggcagagcagttcctcagaaaaacgcagattccagaaaattgggaacatgcaaaatacaagtggtaccttaaggaactgcaggacggtatcggacagaggcagactgtggtgcggaccctgaacgcaacgggggaagagatcatacaacagtcatccaagaccgatgcatcaatactgcaagagaaacttggcagcctcaatctgcgttggcaggaggtgtgtaagcagctgtccgatcggaaaaaacggctggaagaaaccctggaaagactccaggaactgcaagaagcaactgacgaactcgatctcaaactgaggcaggctgaggtgatcaagggatcgtggcaacctgtgggtgatcttctcatagatagcttgcaagatcacctggagaaagtgaaggcgctcaggggtgaaattgcacccctgaaggaaaacgtgtcacacgttaacgacttggctcgacagctgactacccttggcatccagctgagcccatacaacctgagcactctcgaggatctcaacactcgctggaagctcctgcaagtggccgtggaggacagagtgcgccagctccatgaagcacatagggattttggacccgcatcgcagcatttccttagcacctcagtccaaggcccatgggaacgcgcaatttcgccaaataaggtcccgtactatatcaaccacgaaacccaaaccacctgctgggaccaccctaagatgactgagctgtatcaatcccttgccgaccttaacaacgtccggttttcagcataccggaccgcaatgaagctcagacgcctccagaaagccctctgtctcgacctgctgtcccttagcgcggcctgtgatgcccttgatcaacataaccttaagcaaaacgatcagcctatggacatactgcagataatcaactgcctgaccactatctacgatcgtctggaacaagaacacaacaatctcgtgaacgtccccctttgtgtcgatatgtgtttgaactggctgctgaacgtgtacgataccggcagaaccggacgcatccgggtcctttcctttaagaccggtatcatttcactttgtaaggcacatctggaagataagtaccggtatttgttcaagcaagtggcatcaagcaccgggttttgtgatcaacggcgtctcgggctgctgcttcatgactccatccaaattcctcgtcaacttggtgaggtggcatctttcggcggatcgaacatcgagccctctgtgcgctcatgtttccaatttgccaataacaagccagaaattgaagcagcgctcttcctcgattggatgcgactggaaccccagtcgatggtctggcttccagtgttgcatcgtgtggcggccgctgaaaccgccaagcatcaggccaagtgtaatatctgtaaggaatgtccgataataggattcagataccgatcacttaagcactttaactacgacatctgtcaatcatgctttttcagcgggagagtcgcaaagggacataagatgcattacccaatggtggagtactgtactcccaccacttccggcgaagatgtcagggactttgcgaaggtgctcaagaataagtttagaaccaagcgttactttgctaaacatcccagaatgggatacctgccggtccagaccgtgctggaaggcgacaacatggaaactgataccatg

SEQ ID NO: 251397 - DNA, 3432 bp, synthetic construct
  misc_feature 1..3432: note = Description of Artificial Sequence: Synthetic coding sequence
  source 1..3432: mol_type = other DNA
atgctctggtgggaggaggtggaggattgttacgagagggaagatgtgcagaaaaagaccttcacgaagtgggttaacgcacagttctcaaagtttggaaagcagcacattgagaatctgttttccgaccttcaggacggccggcgccttctggatctgctggaggggctgactggacaaaagctgcctaaggagaagggatcaacccgcgtgcacgctctcaataatgtgaacaaagcactgagggtgctgcagaataacaatgtcgaccttgtgaatattggttcgaccgacatcgtggatggaaaccacaaacttacgttgggcttgatctggaacattatcctgcattggcaagtgaaaaacgtcatgaagaacataatggcaggactgcagcaaacgaactccgaaaagattctgttgtcgtgggttcgccaatcgactagaaattaccctcaggtgaacgtcataaactttaccacctcgtggtcagatggactggcattgaacgccctcattcactcccatcggcccgacctttttgactggaactctgtggtttgtcagcagtcagcaactcagaggctggaacacgcatttaacattgcccggtaccaactgggaatcgagaagttgcttgatcccgaggacgtggacactacctacccagataagaagtccattctgatgtatatcacctccctgttccaggtgctgcctcagcaagtgagtattgaagctattcaagaagtggaaatgcttccccgaccaccaaaggttaccaaggaggagcattttcagctccaccatcagatgcactactcccagcagattaccgtgtccctggcacaaggatacgaaagaacttcctcgcctaagcccaggtttaagtcctatgcctatacccaggcagcttacgtgaccactagcgacccaactaggtcaccctttccatcccagcaccttgaagcccctgaagataagtcgttcggatccagcctgatggaatccgaagtcaacctggatagatatcaaaccgcactcgaggaagtgctgtcctggcttctgtcggcagaggacaccctgcaagcacaaggcgagatctcgaacgatgtggaagtggtgaaggatcaatttcatacccacgaaggctacatgatggacctgaccgcacatcagggccgcgtgggaaatatcctgcaactcggctcaaagctgattggtaccgggaaacttagcgaggacgaggaaactgaggttcaggaacaaatgaatttgttgaattcacgatgggaatgcttgcgcgttgcgtcaatggaaaaacagtcgaaccttcatagagaaatctcgtacgtcccttccacctaccttaccgaaattacccatgtgagccaggcgctccttgaggtggagcagctgctgaacgcacctgatctgtgtgcgaaggattttgaggatctcttcaaacaagaagagtccctcaagaacatcaaggactcgctgcagcaatcatccggtcgcattgatatcatacatagcaagaaaactgccgccctgcagtcggctacccctgtcgagcgggtcaaactgcaagaagcactcagccaactcgacttccagtgggaaaaagttaacaagatgtacaaagatcgccagggacggtttgataggagcgttgaaaagtggagaagattccattacgatatcaagatctttaaccaatggcttaccgaagcagaacaattccttcggaaaacccagatccctgaaaactgggagcatgcaaagtataagtggtacctgaaagaattgcaagatggtataggccaaagacagaccgtggtgagaacccttaatgcaactggcgaggagatcattcagcaatcgtcaaagaccgacgcgtcgatcctgcaggagaagctgggtagccttaaccttagatggcaagaagtgtgtaagcagctctccgacaggaaaaaacggctggaagaaaccttggagagactgcaagagcttcaggaagcaaccgatgagctggaccttaaactcagacaggctgaagtgattaaaggatcgtggcagcctgtcggagatcttctgatagactcgctgcaagaccaccttgagaaggtgaaagccctcagaggtgagattgccccgctgaaggaaaacgtgtcgcatgtcaatgatcttgcgaggcaactgaccactcttggaatacaactgtcgccatataacctgagcactctggaagatctgaacactagatggaaactgctgcaagtcgctgtggaagatcgtgtccggcaactgcacgaagcacaccgggattttggtcctgcaagccaacatttcctgtccactagtgttcaaggcccctgggaacgggcgatctctcctaacaaggttccgtactatatcaatcatgaaacgcagaccacttgttgggaccatcctaagatgactgaactttaccaaagcctggcagacctgaacaacgtccgcttcagcgcctaccggaccgccatgaagctccgacggcttcagaaggcactgtgtcttgatctcttgtccctgagcgcagcatgtgatgcacttgatcagcataatctgaaacaaaacgatcagcctatggacattcttcagattatcaattgtcttacgactatctacgatcgtctggaacaggagcataacaaccttgtgaacgtgccactttgtgtcgatatgtgccttaattggcttcttaatgtctacgacaccggacgaactgggcgtattagggtcctctcttttaagactggaattatcagcctctgcaaggcacatctggaagataagtaccgatacctgttcaagcaggtcgcaagctcgacggggttttgtgaccagcgccggctgggtcttttgcttcatgattccatccaaattccccgtcaactcggagaagtggcttcgttcggaggtagcaacattgaaccttcggtgcggtcctgctttcagtttgctaacaataagccagaaatcgaagctgcattgttccttgattggatgcggctggaacctcagtccatggtgtggcttccagtattgcatagagtggccgcagccgagactgcaaagcatcaggcaaagtgtaatatctgcaaagaatgtcctattatcgggtttaggtacagatcacttaagcactttaactacgatatttgtcaatcatgcttcttttccggtagagtggcgaagggacataagatgcactacccaatggtggaatactgcaccccgaccacttcgggtgaagatgtgagggatttcgcgaaggttttgaaaaacaagtttagaaccaaaagatacttcgccaagcatccacggatgggatacctgccagtgcagactgttcttgaaggagacaatatggaaaccgacactatg

SEQ ID NO: 251398 - DNA, 3432 bp, synthetic construct
  misc_feature 1..3432: note = Description of Artificial Sequence: Synthetic coding sequence
  source 1..3432: mol_type = other DNA
atgttgtggtgggaagaggtagaagattgttatgaaagggaggatgtgcaaaagaagactttcaccaagtgggtgaatgcccagttttcaaaattcggcaaacaacatattgaaaatctatttagcgatctgcaggacggacgccgtctgctagacctcttagagggcttgacaggacagaaactgcccaaagagaaagggtccacaagggtacacgcgctgaataatgttaacaaagctttacgggtcttacaaaataataatgtagacctggttaatattggaagcaccgatatcgttgacggcaaccacaaactcaccctagggctgatatggaacattatcctgcattggcaggttaaaaacgtaatgaagaacattatggcaggactgcagcagaccaactcagagaagattctgctgtcatgggtgcgccagtcaacccggaattacccccaagtgaacgtcatcaattttacaacatcctggagcgatgggctcgctctgaatgccctgatacattctcaccggccggatctgtttgattggaactctgtggtctgccagcaatcagcaacacaacgtctagagcacgctttcaatatcgccagatatcagctgggcatcgagaagctgctcgatcctgaagatgtagataccacataccctgataagaaatccattctgatgtacatcacaagtttgtttcaggtactgcctcagcaggtttccatagaagccatccaagaagtggagatgctccctcgcccacctaaagtcacgaaggaggagcatttccagctccaccaccaaatgcactacagtcagcagatcaccgtgagcctggcccagggatatgagcgcacaagcagccctaagccgcgtttcaagagttacgcttacacacaagccgcctacgtgacaacctctgatcccaccaggtccccgtttccaagtcagcatctagaagcgcccgaggataagtcttttggctcctctttaatggagtctgaagttaacctagatcggtaccagacggcgctggaggaggtcctgtcatggctgctgtccgctgaggatactcttcaggcacagggcgaaatctcgaatgatgtcgaggtagtgaaagaccagttccatacacatgagggttatatgatggacctaaccgcgcaccagggacgggtgggcaatatcctccagttgggcagcaaactgatcggaacgggtaaactttccgaggatgaggaaacagaggtccaagaacagatgaatctcctgaatagtcgatgggagtgtctgagagtggcgagtatggaaaagcaaagcaacttacatagagaaatctcctacgtgccttctacctacctgaccgagatcacccatgtgtctcaggcactgttggaggtggagcaactgctgaacgcaccagatctgtgtgccaaagatttcgaggatctgtttaaacaggaagagtcgttgaagaatatcaaagattctctgcagcaatcctctggccgaattgacatcatccactccaaaaagacagcagctctccaaagtgccactcccgtagagagggtcaagctacaggaagcactctcacagctggactttcagtgggaaaaggtgaataagatgtacaaggatcgtcagggaagattcgaccggagcgtagagaaatggcggagattccactacgacattaagatatttaaccagtggttaacggaggcggaacagttcctgagaaaaacccagatccccgagaattgggaacacgccaaatataaatggtacctgaaggaactgcaggatggtatcgggcagaggcagactgtggtaaggaccttgaacgcaacaggggaggaaatcatccagcagagcagtaagaccgatgcttcgattctccaagaaaaactcggttcacttaatctgcgctggcaggaggtttgcaagcaattatccgaccgaaagaaacggctcgaggaaacgttggagagattgcaagagctccaggaggctactgatgagctggatttgaagcttagacaggctgaggtgatcaagggttcatggcaaccagtcggagatctgctgatcgattccctgcaggaccatctcgagaaagtgaaggctcttcgtggcgaaattgctccattaaaggaaaatgtgagtcacgtgaacgatctggcccgccagctgactacactgggcatccagctgtcgccttacaatctgagcactcttgaggatctgaataccaggtggaaactgctgcaggtcgcagtggaagacagggtgcgtcaactgcacgaggcccaccgtgattttggacccgccagccagcatttcctaagtacttctgtacagggcccctgggagagagccatcagccctaacaaggtaccatactacatcaaccacgagactcaaactacctgctgggaccaccccaagatgacggaactctatcagtccctggctgatctcaataacgtacggttctccgcctaccggacagcaatgaaattgcgacggctgcagaaggcactctgtctggaccttctgagtttgtctgccgcctgtgacgctctcgaccaacataacctgaaacagaacgatcagcctatggatatactgcagattattaattgtctcacgactatctacgaccggctcgagcaggaacataacaatctagtgaatgttccgctgtgcgtggacatgtgtctgaactggctgctgaacgtttatgacaccggccgcaccggtaggattcgggttttgtcctttaaaacagggattatctccctgtgtaaggcccatttggaggataagtatagatatctgttcaaacaggtcgcgtcgtcaacaggattctgcgaccagaggaggctgggactactgctgcatgattctatccaaatcccaagacagcttggcgaagtagcctcattcggtgggagtaacatcgagccatccgtacgatcctgctttcagttcgcaaataataaacccgaaatcgaggccgccctgttccttgattggatgaggctggaacctcagagtatggtttggctgcccgtgcttcatcgtgtggcggcggctgagaccgccaaacatcaagccaagtgcaacatctgtaaagagtgccctatcatcgggttcagataccgaagtctcaaacacttcaattatgatatctgccagagctgtttttttagtggacgagtcgctaaaggccacaagatgcactatccgatggtggaatactgtactcctaccacgagtggagaagatgtccgggactttgccaaggttctcaagaacaagtttagaactaagagatattttgccaagcacccgcggatgggctatctccccgtgcagacggtgctcgaaggtgacaacatggaaaccgatacaatg

SEQ ID NO: 251399 - DNA, 3432 bp, synthetic construct
  misc_feature 1..3432: note = Description of Artificial Sequence: Synthetic coding sequence
  source 1..3432: mol_type = other DNA
atgctgtggtgggaggaagtggaggattgctacgaaagggaagacgttcaaaagaagaccttcacgaaatgggtgaatgctcagttttccaaatttggaaagcagcatatagaaaatctgtttagcgacctgcaagacggaaggaggctattagatctccttgaggggttaacaggacagaagttgccaaaagagaagggctctacaagagtgcatgccctgaacaatgtgaataaagctcttagagtcctgcagaataacaacgttgatttggtcaatattgggtctacggatatagtcgatggcaaccataaacttaccttaggcctgatctggaatattattctgcactggcaggtgaagaatgtgatgaagaatatcatggctggactccaacaaacgaacagtgaaaaaatactgctgagttgggtgaggcagagcaccaggaactacccccaggtcaacgtgattaatttcacaacttcatggtcagatggcttggctctgaacgccttgatccactcccatcgaccagacctgttcgattggaacagtgtagtctgccagcagtccgcaacacagcggctagagcacgcttttaacatagcccgctatcagctcggcatcgagaagctgctggatcccgaggatgtggatacaacgtatcccgacaaaaagagcatcctcatgtatataacctctttatttcaagttctgccccagcaggtctccatcgaggcgattcaagaggtggagatgctgccccgccctcccaaagtaacgaaggaggagcactttcagctccaccatcaaatgcactactctcaacagatcacagttagccttgcccagggttatgagagaacgtcttccccaaagccacgctttaagtcctacgcctatacccaggccgcctacgtgacgacaagtgacccaacacggagcccttttccgagccagcatttggaggctcctgaagacaaatcctttggttctagcctgatggagtccgaagtgaacctagacagataccagacagcgctggaagaagtgctgtcatggcttctgtcagcagaggacactttgcaagcccagggggagattagcaacgatgttgaagtagttaaggatcagtttcatacgcacgagggttatatgatggacctgaccgcgcaccaggggcgggttggcaacatcttacagcttggctccaaactgattgggaccggcaagctgtccgaggacgaagaaacagaggtgcaggaacagatgaatttgcttaattcgcgatgggaatgcctgcgggtggcctctatggagaagcagtccaatctccaccgcgagatatcatatgtcccctccacttatctcacggagataacccacgtctctcaagcgctgctcgaggtagaacagctgctcaacgccccagatctgtgtgccaaagattttgaggacctattcaaacaggaagaatcactgaaaaatatcaaggatagcctgcaacagagtagcggacgaattgatattatccattccaagaagactgcagccctccagtcagcgactcctgtagagcgcgttaagctgcaggaagcattaagccagttggacttccaatgggagaaagttaacaagatgtataaagacagacaggggcgctttgatcgttcggtagagaagtggcgaaggtttcattacgatatcaagattttcaatcagtggctgactgaggcggagcagtttctccgtaaaacccagattcctgaaaactgggagcacgcgaaatacaagtggtatctcaaggagctgcaagacggcatcggacagcgtcaaactgtagtcaggacactaaacgcgacaggagaagagatcattcagcagagttcgaaaactgatgcaagcatcctgcaggaaaaactagggtcattgaatctccggtggcaggaagtctgtaagcaactgtctgataggaaaaaacgactggaggaaaccctcgagaggttacaggagctacaggaggctactgacgagttggatctgaagctcagacaggctgaggtgattaaaggctcttggcagcctgtgggcgacctgctaatagacagcttgcaagaccatttggagaaggtaaaggctctcaggggcgaaatcgctccactgaaggaaaatgtcagccatgtgaacgatctcgcccgccaactcactacactgggcattcagctgtctccgtacaacttgtcgacactggaggatctgaacaccagatggaagctcctgcaggtggccgtggaagacagggtcagacagttgcacgaggcccaccgcgattttggccctgcttcccaacattttctttctactagtgtgcagggtccatgggagcgagcaatctcacctaacaaggtgccttattacattaatcacgagacccagacaacttgttgggatcacccgaagatgacagagctttatcaaagtttggccgatttaaacaatgtgcggtttagtgcgtatcgcacagcaatgaaactgaggagactgcagaaggctctatgtttggacctgctgtcactgtcagcggcctgtgacgccttagaccagcataatcttaaacagaacgaccaacctatggatatcctccagatcattaactgtctcactaccatatacgatcgccttgagcaagagcacaacaacctggttaacgtcccgctgtgcgtggacatgtgcctgaactggttgcttaatgtgtacgacacagggagaaccggcaggatccgggtgttaagtttcaagacaggtatcatttccctgtgtaaagctcatctcgaggacaaatatagatacctcttcaagcaggtggctagcagcaccggtttttgcgatcagagaagactgggactgcttcttcacgactctatccagattccaaggcagctgggggaggtggcttcatttggcgggtcaaatattgaaccaagcgttcggtcatgctttcaatttgcaaacaacaaaccagagatcgaggccgccttgtttctggattggatgagactggaaccccagagcatggtatggctgcccgtccttcaccgagtcgccgccgctgagactgcgaagcatcaggctaaatgtaatatatgcaaggagtgtcccataattggattcagatatcgttcgctcaaacacttcaattacgacatttgtcagagctgttttttctccggaagggtggctaagggccacaaaatgcattaccctatggtggaatattgtactcccaccacatccggggaggacgtacgtgactttgctaaggtgctaaagaacaaattcaggaccaaaaggtattttgccaagcacccgcggatgggttatctcccagttcagaccgttctggagggcgacaatatggagactgacaccatg

SEQ ID NO: 251400 - DNA, 3432 bp, synthetic construct
  misc_feature 1..3432: note = Description of Artificial Sequence: Synthetic coding sequence
  source 1..3432: mol_type = other DNA
atgctttggtgggaagaagtcgaagattgttatgaaagagaagatgtgcagaagaaaacctttaccaagtgggtgaatgctcagttttccaagtttggaaagcagcacatcgaaaatcttttttccgatcttcaagatggccgcagacttctggacctcctggagggccttactgggcaaaaacttcctaaggagaagggtagcactcgtgtgcatgcactgaataatgtgaacaaggcactccgcgtgctgcagaacaacaatgttgacctggtgaacattggttccactgacatagtggacgggaaccataagctgacgctgggccttatctggaacattatcttgcattggcaagtgaaaaatgtgatgaaaaacataatggcaggccttcaacagactaactcggaaaagattctgctttcgtgggtgcggcagtccactagaaattaccctcaggtgaacgtcatcaacttcaccactagctggagcgacggactggcgctgaatgcactgatccattcccatcgacctgacctgtttgattggaactctgtggtgtgccagcaatccgcgacgcagcgcctcgagcacgcctttaacatcgcaagataccagctgggcatagaaaagctgcttgatcctgaggacgtggacaccacttaccccgataagaagtccatccttatgtacatcacctcgttgtttcaggtcctgccacagcaggtgtccatcgaagccatacaggaggtggaaatgctgcctaggccgcccaaggtgaccaaggaggagcactttcagctccatcaccagatgcattacagccagcaaattactgtctccttggcacaaggttacgaacgtactagctcccctaagcctcggttcaaatcgtacgcgtatacccaagcagcgtacgtgactacgagcgatccgaccaggagtccattcccttcacaacatcttgaagctccagaagataaatcatttggatcaagcctgatggagtccgaggtgaaccttgataggtaccagaccgcactggaagaggtgctgtcgtggctcctttcggcagaagatactctgcaggcacaaggtgaaatttctaacgatgttgaggtggtgaaggatcagttccacactcacgaggggtacatgatggacctcacggcacatcagggtagggtggggaacatcttgcagctgggatccaagttgattggtaccggaaagctgtcggaagatgaggaaactgaagtccaggaacagatgaatcttctcaatagcagatgggagtgtctgagagtcgcctcgatggagaagcaaagcaatctgcacagggaaatctcttacgtgccatcgacctacctcactgaaatcacccacgtttcccaggcgctgcttgaagtggaacaacttctcaacgcacccgatctctgcgcaaaagacttcgaggacctctttaagcaagaggaatcgctgaagaacatcaaagactccctccaacaatcctccgggcgaatagacattattcactcaaagaaaacggcagcactccaatccgcaaccccagtcgaacgagtcaaacttcaggaggcgctgtcccagcttgattttcaatgggaaaaggtgaacaaaatgtacaaggatagacagggacgatttgatagatcggtggagaaatggaggagattccattatgatatcaagatattcaatcaatggctgactgaagcagagcagttcttgcggaaaacccaaatacctgaaaactgggaacatgcaaaatacaaatggtacctgaaggaattgcaagatggcataggacaacgtcaaaccgttgttcgcaccctcaacgcgactggcgaagaaatcattcagcaatcttccaaaactgatgcctcaattctgcaggaaaagctggggtcccttaatctgcgatggcaagaagtgtgcaagcaactgagcgatagaaaaaagcggcttgaagaaactctcgaaagactccaagaattgcaggaggcgaccgatgaacttgacctcaaactgagacaagcagaagtcattaagggatcctggcaaccagtgggagatcttctcattgactcactccaagaccatcttgaaaaagtgaaggccttgagaggcgagatagcccctctcaaggagaacgtgtcccatgtgaacgatctggcacggcaattgaccaccctggggatccagctgagcccttacaacctctcgactctcgaggatcttaacacccgctggaagctgctccaagtggcagtggaggacagggtgagacagctgcatgaagctcatagagactttggaccagcctcccagcattttctctctactagcgtgcaaggtccgtgggaaagggccatctccccgaacaaggttccctactacattaaccatgagacgcagactacgtgttgggatcatccaaagatgaccgagctctaccaatcactcgccgacttgaacaatgtccgtttttctgcctacagaaccgcgatgaagctgcgcaggctgcagaaggccctgtgtctggatctccttagccttagcgcagcatgtgatgcacttgatcaacacaatcttaagcagaacgatcagccaatggatatccttcaaatcatcaattgtcttactaccatttatgaccgccttgaacaggaacataacaacctggtgaacgtgcccctttgtgtcgacatgtgccttaattggctccttaacgtgtacgatactggcagaaccgggcgcatccgggtgctgtcgtttaagaccggaatcatctcactttgtaaggcgcatttggaagataagtaccgatacctgttcaagcaagtggcctcctcaaccggattttgcgatcaaaggagactgggacttctgctgcacgattctattcaaattccccgccaattgggcgaggtcgcatcttttggcggctcgaatatcgagcctagcgtcaggtcgtgtttccaatttgcgaataacaagccggaaattgaagcagcactgtttttggactggatgcgtcttgagccccaaagcatggtgtggctccctgtgcttcaccgggtggccgcagcagagactgcgaaacaccaggccaaatgcaacatttgtaaggaatgtccaataatcggattccgttacagatccctcaaacatttcaattatgatatttgccaatcatgttttttctcgggacgggtggcgaagggacataagatgcactacccaatggtggagtattgtacccccactaccagcggggaagatgtgcgggactttgcaaaggtgctgaagaacaagttccggaccaagaggtacttcgcgaagcatcctagaatgggataccttccggtgcagaccgtgcttgagggtgataacatggaaactgacaccatg

SEQ ID NO: 251401 - DNA, 3432 bp, synthetic construct
  misc_feature 1..3432: note = Description of Artificial Sequence: Synthetic coding sequence
  source 1..3432: mol_type = other DNA
atgttatggtgggaggaagtagaagactgctatgagcgcgaggatgtgcaaaagaaaacctttacaaagtgggtgaatgcacagttttcaaagttcggtaaacagcacatcgagaacctgttcagcgacttacaggatgggcgtagactgctggatctgcttgagggactcacaggacagaaactgcctaaagaaaaagggtcaaccagggtgcacgctctaaataacgttaacaaggcgttgagggtgctgcagaataacaacgtggacctagtcaatatcggctccacagacattgttgacggtaatcacaagctaacactgggcttgatttggaacattatcttgcactggcaggtgaagaacgttatgaaaaatatcatggccggccttcagcaaacaaattcggaaaagatattgctgagttgggtccggcagtccacccggaactacccacaggtgaacgttataaactttaccacctcatggagtgacggacttgcattgaacgccctgattcattcccacagacccgatctgtttgattggaatagtgttgtttgccagcagtcggctacgcagagattagaacacgcgtttaatatcgcacgataccagctgggtatagaaaagcttctggatcccgaggacgtggatacaacttacccagacaagaagagcatcctcatgtatataacctccctcttccaagtgctgccacagcaagtgagtatcgaggctatccaggaggtggaaatgctcccaagaccgccaaaggttaccaaggaggagcatttccagttgcaccatcaaatgcattatagccagcagattaccgtgtcattggcccaggggtacgagcgaacatctagccctaagccacgattcaaaagctatgcatatactcaggccgcttacgtcacaacttccgaccccacccgatcacctttcccatctcagcacttagaagcccctgaggacaaatctttcgggtcatcgctcatggaatccgaggtgaacctggaccggtaccaaacggccttggaggaagttctatcctggctcctatcagctgaggatactctccaggctcagggcgagatatctaatgatgtcgaagtcgtcaaagatcagttccacactcatgaagggtacatgatggatctgactgcacatcagggacgggtcggtaacatcctgcagctcggatccaaattgattggcactggaaagctctctgaagacgaagagactgaggttcaggagcagatgaatttgctgaatagtaggtgggagtgcctcagggtagctagtatggagaagcagtccaacctgcaccgtgagatctcctatgtgccttctacatacctcaccgagattacacatgtgagccaggcccttctagaggtggaacaattgctgaacgctcctgacctgtgtgcaaaagattttgaagacctctttaagcaggaggaatcccttaaaaacatcaaggatagcctccagcagtctagtggccgaattgatatcatccactccaaaaaaacagctgccctgcagagcgccacgccggtggagagagtgaagctccaggaggccctgtcacagctggattttcaatgggagaaggtgaacaagatgtacaaagatcgtcagggtcggttcgaccgctccgtcgagaagtggaggcggtttcattacgatatcaagatattcaatcagtggcttacagaggcagagcagtttctgagaaaaactcagatcccagagaactgggaacacgctaagtacaaatggtacttgaaagagttgcaggatggaattggccagagacagacagttgttcggaccctgaacgcaaccggggaagagattatccagcaatcctctaaaactgatgcttctatactgcaggagaaacttgggtcactgaacttgcggtggcaagaggtgtgcaagcagctgagcgatcggaagaaaaggttggaggaaactctggaaaggttgcaggaacttcaagaggccaccgatgagctcgatttgaagctaagacaggcagaggtaatcaagggctcttggcagcccgtgggagatctcctgatcgattcactgcaagaccatttagagaaggtgaaagccctcagaggcgagatcgcacccctaaaggagaatgtttcccatgtgaacgatctggctcggcagcttacgactctaggaatccaactatccccttataacctctctaccttggaggacctgaatacaaggtggaaactgctgcaggttgccgtggaagatcgcgtgaggcagttgcacgaggcgcaccgtgatttcggcccggcttcccagcactttctcagcaccagtgtgcaaggcccgtgggagagagcaatttccccaaataaggtaccctattacataaaccatgagacacagactacctgctgggaccatcctaagatgaccgagttgtaccaaagcctggcggacctcaacaatgtcaggttctctgcttaccggaccgcgatgaaactacgtagactgcagaaggcgttgtgtttagacctgttgagtcttagtgctgcctgcgatgctcttgaccaacacaacctgaagcagaatgaccagcccatggatatccttcagatcattaactgtctgaccaccatttacgatcggctggaacaggagcacaacaacttagtgaacgtaccgctgtgtgttgacatgtgtctaaattggctgctgaatgtttacgacaccgggcggaccggtcgcattcgtgttttatctttcaaaaccgggataataagcctgtgtaaggcccatctggaagacaaatatagatacctgtttaaacaggtggcgagctccaccggcttttgtgaccagagacgactggggttgctactgcatgactccatccagatcccgcgccagttgggcgaagtcgcatccttcgggggctccaatatcgagccaagcgtcaggtcttgtttccagttcgctaacaataaaccagaaatagaggctgccctgtttctagactggatgaggctcgagcctcaaagcatggtgtggcttcccgtgttgcatagggtcgcagccgcagaaaccgccaagcaccaggccaagtgtaatatctgtaaggaatgcccaattatcggcttcaggtaccgaagcttgaagcactttaattatgacatctgccagagctgttttttttccggtagggtagctaaaggccataagatgcactatccaatggtggagtactgcacgccaacgacttcaggagaagacgtgcgcgacttcgccaaagttctcaagaataaatttaggactaaaagatatttcgctaagcaccctcgtatgggctacctacctgtgcagactgtgctggaaggtgacaacatggaaaccgatactatg

SEQ ID NO: 251402 - DNA, 3432 bp, synthetic construct
  misc_feature 1..3432: note = Description of Artificial Sequence: Synthetic coding sequence
  source 1..3432: mol_type = other DNA
atgctttggtgggaagaagtggaagattgttacgaacgcgaggatgtccaaaagaaaaccttcaccaagtgggtcaacgcccaattttccaaattcggaaagcagcatatcgagaatctgttttcggaccttcaagatggccgccgcctcctcgatctgctcgaaggactgactgggcagaaacttcctaaggagaaaggatcaactcgcgtgcatgcgctcaacaacgtgaacaaggcactccgcgtgttgcagaacaacaacgtggatctggtgaacattgggtccaccgatatagtggatggtaaccacaagctcactctgggccttatttggaacattattcttcactggcaggtgaaaaatgtgatgaagaacatcatggcgggccttcaacagacgaactccgagaagattttgctctcctgggtccggcagtcgactagaaactacccccaagtgaacgtgataaactttactacctcctggagcgacggtctggccctgaacgcactgatccattcgcacaggccagatctgttcgattggaatagcgtcgtctgtcagcaatccgcaacccaacgcctggaacatgcatttaacatcgcaagataccaacttggcatcgagaaacttcttgatcccgaagatgtcgacacgacttaccctgataagaagtcaattcttatgtacatcacctccctcttccaagtgctgccacagcaagtgtccatcgaggcgattcaggaagtggaaatgcttccacgacctcctaaggttactaaggaagaacattttcaactgcaccatcaaatgcactacagccagcaaataactgtctcgcttgcccaaggttacgaacgaacctcgtctcctaaacctcgctttaagtcgtacgcatacactcaagcagcctacgtcactacctcggatccaaccagatcgccgttcccgtcacaacaccttgaagcaccagaagataagagcttcggttcgtcactcatggagtccgaggtcaacttggatcgctatcagaccgccctggaagaagtgctctcctggctgctgtccgcagaggatacccttcaggcccaaggagaaatctcgaacgacgtggaagtggtgaaggatcagtttcatactcacgaggggtacatgatggaccttactgcccaccagggcagagtcggtaacatccttcagctggggagcaagctcatcggcacgggtaagctctcggaggacgaggaaaccgaggtccaggaacagatgaatcttcttaactcaaggtgggaatgtcttagagtcgcgtcgatggagaagcaatccaaccttcaccgcgaaatttcatacgtgccttcgacttacttgactgaaattacccacgtgtcccaggcactgctggaggtagaacaactccttaatgcaccagatctttgtgccaaggactttgaggatcttttcaagcaagaagagtcactgaagaacattaaggatagtctccagcagagctccggcaggattgacattattcattcgaagaaaactgcagcattgcagtcggccacgccagtggaacgtgtgaagctgcaagaggcccttagccagctggactttcaatgggaaaaggtcaacaaaatgtacaaggatcgccaggggcgctttgaccgatctgtggaaaagtggcggaggttccattacgacattaagatctttaaccagtggctcaccgaggcggagcaatttctcagaaagacgcaaattcccgagaactgggagcatgcaaagtacaagtggtaccttaaggaactgcaggatggaatcggtcaacgccaaacggtggtgagaactctgaacgccacgggagaagagattatccaacagtcatccaaaacggacgcaagcattctccaggagaaactgggatcactcaacctgagatggcaagaagtgtgcaagcaattgtccgacagaaagaagagactggaagaaactcttgaaagactgcaagagcttcaagaggcaaccgatgaattggatctgaaacttaggcaagcagaagtcatcaagggttcatggcaacctgtcggagatctcctgattgattccctgcaagaccaccttgaaaaggtgaaggccctcagaggagaaatagcgccacttaaagaaaacgtctcccacgtcaacgatcttgcccgacagctcactaccctgggtattcagctcagcccttacaacctctcgacccttgaagatctgaacacccgttggaagctgctccaagtggctgtggaggaccgcgtgagacaactgcatgaagcacatagggattttggcccagcgagccagcatttcctctccacctcggtccagggtccttgggaacgcgcaatttcccctaacaaagtgccttactacatcaatcacgagacgcagaccacctgttgggatcacccaaagatgaccgagctctaccagtccctggctgaccttaacaacgtgcgtttttccgcgtaccgaactgccatgaaactccgtagacttcagaaagccctctgccttgatctgctctcactgtcggcagcgtgtgacgcgctcgaccaacataatctgaagcaaaacgatcaacctatggacatactgcagattatcaactgccttaccaccatttacgatcgattggaacaggagcacaataaccttgtcaacgtgcctctgtgcgtcgatatgtgtcttaattggctgcttaatgtctatgacaccggaaggactggaagaattcgcgtcctctcgtttaagactggaataatctcgctttgcaaggcgcacctcgaagataagtaccgttaccttttcaaacaggtcgcctcctccactggtttttgtgatcagcggagacttgggcttctgcttcatgattcgatacaaattccccgccaacttggcgaagtcgcgagcttcggagggtcaaatatcgaaccttccgtgcgatcgtgctttcaattcgccaacaacaagcctgaaattgaagcagcactgtttctcgattggatgaggttggagccacagtcgatggtgtggcttcctgttctgcatagagtggccgcagctgagacggcaaagcatcaggctaagtgcaacatttgtaaagagtgtcctatcattggtttcagatacagatccctcaaacatttcaattacgatatctgtcagagctgcttcttttcgggaagggtggccaagggacataagatgcactaccccatggtggaatactgcaccccaactacttcaggtgaggatgtgcgggattttgcgaaagtgcttaagaacaagtttagaaccaagcggtactttgcgaagcatccgaggatgggatacttgcctgtgcagaccgtgctggaaggagacaacatggagactgacaccatg

SEQ ID NO: 251403 - DNA, 3432 bp, synthetic construct
  misc_feature 1..3432: note = Description of Artificial Sequence: Synthetic coding sequence
  source 1..3432: mol_type = other DNA
atgctgtggtgggaggaggtggaggattgttatgaaagagaagatgttcagaaaaagaccttcacgaaatgggtgaatgcacagttttcgaaatttggaaagcagcacatagagaacctgttttcggatctccaggacggaagaagattgcttgatctgctggagggcctgactggtcagaaacttcctaaggaaaagggaagcactcgtgtgcacgccttgaacaacgtgaacaaggcacttcgagttcttcaaaacaataatgtcgacctcgtcaatatcggatccactgacatcgtcgatggtaaccacaagctcacccttggacttatatggaacattatccttcattggcaagtgaaaaatgtgatgaaaaacattatggccggcctccaacaaacgaactccgaaaagatactgctctcttgggtgcgacagtctactagaaactatccccaggtgaatgtgattaactttaccactagctggtcggacggattggcactgaacgcacttatccactcacatagaccagacctgttcgattggaactccgtcgtctgtcagcaatcggccactcaacgccttgagcatgcattcaacattgcaagataccagcttggaatagagaaacttctggatcctgaagatgtcgacactacgtaccctgataagaagtccatccttatgtacatcacctcgctttttcaggtgctgccccagcaagtgtcgatcgaggcgatacaagaagtggaaatgctgccacggcctcctaaagtcactaaggaggaacatttccaactgcaccatcagatgcactacagccagcaaatcactgtgtcgcttgctcaaggttatgaacgtacctcgagcccaaaacctagattcaagtcttacgcatacactcaagccgcctacgtgaccacttccgatcctacccgttccccattcccatcccaacatcttgaagcgcctgaggataagagcttcgggtcatctttgatggaaagcgaggtcaatcttgacagataccagacggcacttgaagaggtgttgtcgtggctcctttcggctgaagatacgcttcaagctcaaggagagattagcaacgacgtggaggtggtgaaggatcagtttcatacccacgaagggtacatgatggatcttactgcccatcaaggtagagtcggaaatatcctccagctgggctcaaagctgataggaaccggtaaactttcggaagatgaggaaaccgaagtgcaggaacaaatgaatctgttgaactcacggtgggaatgtctccgggtggcgtctatggagaagcaatccaatcttcatagagagatttcctatgtgccaagcacttatcttaccgagattacccacgtgtcgcaagcgttgcttgaagtggagcagcttcttaacgcacctgacttgtgcgccaaggattttgaggatctgtttaagcaagaagagtcgcttaagaacataaaggatagcctccagcaatcttctggcaggatcgacataattcattccaaaaagaccgccgccctgcagtccgctaccccagtcgaacgcgtgaagctccaggaagcactgagccaacttgattttcaatgggagaaggtgaacaagatgtacaaggaccggcagggaagatttgaccgttcggtggaaaaatggcgacggttccattacgacataaagattttcaaccagtggctcactgaggcagagcagtttctgcgcaagacgcagatacccgagaattgggaacacgcaaagtacaagtggtacctcaaagaactgcaagatggcatcgggcagcgtcaaaccgtcgttaggacgcttaacgcgaccggtgaagaaatcattcaacaaagctccaaaaccgatgcatccatcctccaggaaaagctgggctcactgaatctgagatggcaggaggtgtgcaagcagttgtccgatcgtaagaagaggcttgaagaaaccctcgaacgacttcaggagcttcaggaggcaaccgatgaacttgacctgaagctccggcaagcagaggtgattaagggttcgtggcaaccggtgggtgaccttcttatcgattcactccaggatcatctcgagaaggtgaaggcactgaggggtgagattgcacctcttaaggaaaacgtctcccatgtcaacgatctcgccaggcagcttacgactttgggcattcaactctcgccttacaacctgtcgacccttgaagatctcaacacccgctggaagctgctgcaagtggctgtggaagatcgggtccgtcaactgcatgaagcacatagggatttcggtcccgcatcgcaacatttcttgtccacttcggtccaaggaccgtgggaaagagctatctccccaaacaaggtgccttactacattaatcatgaaacccaaaccacctgttgggaccacccgaaaatgaccgaactctaccagtccctggctgacttgaataatgtgcgatttagcgcgtaccgaaccgcaatgaagttgaggagacttcagaaggcactctgtctcgatcttctgtccctgtcggccgcttgcgacgcactggaccaacacaatcttaagcagaacgaccagccaatggatatcctgcagatcataaactgcctcaccactatctacgaccgactggaacaagagcacaataaccttgtgaacgtgcctctctgtgtagacatgtgtcttaattggctcctgaacgtctacgatactggacggaccggacgcattcgcgtgctttcgtttaagacgggcatcatttcgctgtgcaaagcccatctcgaagataagtaccgctacttgttcaagcaggttgcctcctccactggattctgtgatcagcggcgcctcgggctcctgctgcatgatagcattcaaatcccaagacaactgggggaggtggcttcatttggagggtcaaatatcgaaccttccgtgaggtcttgctttcaatttgcgaacaataaacccgagattgaggctgccctctttcttgattggatgcgccttgaacctcaatccatggtgtggctgcctgtgctccaccgtgtcgcagcagcagagactgcaaagcaccaagcaaagtgtaacatctgtaaggagtgtcccattataggatttaggtaccgttcgctgaaacactttaactacgatatctgccaatcgtgctttttctcggggagagtcgccaaaggacataagatgcactacccgatggtggaatactgtaccccaacgaccagcggggaagatgtgagggattttgctaaggtgctcaagaacaagttccgcaccaaaagatactttgcaaaacatcctagaatggggtaccttcccgtgcaaacggtgctggaaggtgacaacatggaaactgataccatg

SEQ ID NO: 251404 - DNA, 3432 bp, synthetic construct
  misc_feature 1..3432: note = Description of Artificial Sequence: Synthetic coding sequence
  source 1..3432: mol_type = other DNA
atgttgtggtgggaggaagtggaagactgttacgagagggaagatgtacaaaagaaaacatttacgaagtgggtgaatgcccaatttagcaagtttgggaagcagcatattgaaaatctattctcagatttgcaagatggtcgacgcctgctagatctgctcgaaggccttacgggccagaagttaccaaaggagaaagggtcaactcgcgtgcatgccctaaataatgtgaacaaggcattaagagttcttcagaacaacaacgtggacttggtgaatatcggtagcactgatatcgttgacggtaatcataagttgactttggggctcatctggaatatcatcctccactggcaggttaagaacgttatgaagaacattatggccggcttgcaacagactaacagtgaaaagattttgttgagttgggtacgccagagcaccaggaactaccctcaggtcaatgtcatcaattttaccaccagctggtcagatggactagcgctcaacgcactaattcactcacatcgccccgacctatttgattggaattccgtcgtgtgccagcagtcggccacacaacgcctagagcacgcattcaatattgcccgttaccagcttgggatcgaaaagttactggacccagaagacgtggacactacataccccgacaaaaagtcaattttgatgtatatcacctctctctttcaggtgcttcctcaacaggtgtcaatagaggctatacaggaggtagaaatgctgcccagaccccccaaggttactaaggaagaacacttccagctccatcaccagatgcattatagccaacaaataaccgttagcttagcccagggctatgagcggacatcttcacctaagccacgattcaaatcctatgcatatactcaagcagcgtacgttactacatcggatcccacgcgatctcccttccctagtcagcatttggaggctcccgaggacaagtctttcggatcctctttgatggagagtgaagtcaatttagaccggtaccagacggccctcgaggaggtactttcttggcttctatctgccgaagacactcttcaggctcaaggcgagatttccaatgatgtagaagtggtcaaggaccagtttcacacccacgagggttacatgatggatctcactgcccatcaggggcgtgttggcaacattttacagctgggatcaaaattgatcggcacaggcaaactttcagaggacgaagaaaccgaggtgcaggagcagatgaaccttctgaactctaggtgggagtgcttgcgagttgcttccatggagaaacaatcgaacttgcaccgtgagattagttatgtgcctagcacttatctcaccgaaattacccacgtgagtcaggcacttctcgaagtcgagcaactcttgaacgccccggacctttgtgctaaggatttcgaggatctcttcaaacaagaggagtcccttaagaacatcaaagattcgctgcagcaatcctctggtcggatcgatattatccactctaaaaagaccgctgccctccagagtgccacgcccgtggaacgtgttaaactgcaggaggctctatcacaactcgatttccagtgggaaaaggtcaacaaaatgtataaagaccgacaggggcggtttgacagatccgtggagaaatggcgccgctttcattatgacatcaagatattcaatcagtggttaactgaagctgaacagtttcttagaaaaacccaaattcctgagaattgggaacatgctaagtacaagtggtacctaaaagagttacaggacggtataggccaacggcaaaccgtggtccgcacactgaatgcaacgggcgaagaaataatccaacaatcatcaaagacggacgctagcatcttacaggagaaactcggctcccttaacctacggtggcaggaggtgtgcaaacagctttccgatcgcaagaagcgactcgaggagactttggagcggttgcaggaacttcaagaggccacagatgagctcgaccttaagctccggcaagctgaggtaattaagggatcatggcagccggtcggggatctcctcatagattccctccaggaccatttggaaaaggttaaagccctgaggggcgaaatagctcccctcaaagagaatgtcagccatgtgaatgacctcgctcggcagctaactactctcggcatccaactatccccctacaacctttctaccctggaagatcttaacacccgttggaaattgctgcaagtggccgttgaagatcgagtccgccagcttcatgaggcacatagagacttcggcccagcatcacaacatttcctgtctacttcggttcaggggccgtgggagcgggcgatctctcccaataaggtgccttactatattaaccacgaaacacaaactacatgttgggaccatcctaaaatgactgaactgtaccaaagcttggcagatctgaacaatgtccgtttttctgcctaccgcaccgccatgaaactacggaggttgcagaaggccctttgcttggatctcctgtcgctctcagccgcatgtgacgctcttgaccaacacaatctaaaacagaatgatcagccaatggacattctccaaatcataaattgccttactactatctacgatcggttggaacaggaacataacaacctagtaaacgtacccctgtgtgtcgatatgtgcttgaactggctcctaaatgtttatgatacaggcagaactgggcgcattcgtgtgctttccttcaagaccggcattatcagtttgtgtaaggcccatttagaggacaaatatcgatatctatttaagcaggtcgcctcctctacaggtttctgcgaccagaggcggcttggactcttgctgcatgattctattcaaatacctcgccagctaggagaggtagcctcgttcggcggttctaacatcgagccctccgtgcgttcctgtttccagttcgccaataacaaaccagagattgaggcagctctcttcctggattggatgcgcctcgaaccacagtcgatggtgtggctacccgtgctccatcgtgttgcggctgctgagacggccaaacaccaagccaagtgcaacatttgcaaggagtgtccgattataggtttccggtataggtctctgaaacactttaactacgacatctgccagtcttgttttttcagtggtagggtcgccaaaggccataagatgcattaccctatggtggagtattgtaccccaacgactagtggtgaagacgtgagggacttcgcaaaggtcttgaaaaataagtttcgcacgaagcgttatttcgccaagcatccccggatgggatacctcccggtccagaccgtcctcgagggtgataatatggagaccgatactatg

SEQ ID NO: 251405 - DNA, 3432 bp, synthetic construct
  misc_feature 1..3432: note = Description of Artificial Sequence: Synthetic coding sequence
  source 1..3432: mol_type = other DNA
atgctctggtgggaggaggtggaagattgttacgaacgtgaggatgtccagaaaaaaacattcaccaagtgggtgaacgcacagtttagcaagttcggaaaacaacacattgagaatctcttctccgatctccaggatgggcggaggctgttggacctcctggaaggactgacaggacagaagttaccaaaagaaaaaggatcgaccagggtacacgcccttaataacgtgaacaaggccctccgcgtcctccaaaataacaatgtcgacttggtgaacataggatcaactgatatcgtggacgggaatcataagctaaccttgggccttatatggaatatcatcttgcattggcaggtaaaaaacgtgatgaagaatatcatggcaggcctccagcagactaactctgagaagatcttgctgagctgggtcagacagtcaaccaggaattatccccaagtcaacgttatcaacttcactaccagctggtctgatggattggccttaaatgcattgattcactcacataggccagatctgtttgattggaactccgtagtatgccaacagtctgccacccagagactagagcatgccttcaatatcgccagataccagctcggtattgagaaactgcttgacccggaagatgtagacaccacatatcccgacaagaaatctattctgatgtacataacatcgctgttccaggtgctgccccagcaggtatctattgaggccatccaagaggtagaaatgttgcccaggcctcctaaggtgactaaggaggagcattttcagttgcatcaccagatgcactacagccagcagatcaccgtgagtctggcccagggctatgagaggacatcatcacccaagccaagatttaagtcctacgcgtacacccaggcggcctacgtaaccaccagcgatcccactcggagtccttttccaagccagcatctagaggcccctgaggacaaaagcttcggcagttcactgatggaaagcgaagtcaatcttgatagatatcagactgcacttgaggaggtgttgagctggctactttctgctgaggacacgcttcaggcgcaaggagagatttctaacgatgtagaagtagtcaaagatcagttccatacccatgagggctatatgatggacttgaccgctcatcaagggcgggtgggtaacatacttcagctggggtctaagttgatcggaaccggaaagttgtcggaggacgaggaaaccgaagtgcaggagcagatgaatctcctgaacagcagatgggaatgtctgcgcgtggcatcgatggagaaacagagcaatctacaccgtgagattagctatgtgcccagcacctatctgacagagatcacacatgtgtcccaggccctgttggaggtggaacagctgctgaatgctcctgatttgtgtgctaaggatttcgaagacctgtttaagcaggaggagagcctcaaaaacatcaaggacagtcttcagcagagcagcggccgaatcgatatcatccactccaaaaagacagcagccttgcaaagcgctactccggttgagcgcgtgaaactgcaggaggccttgagccagttggacttccagtgggaaaaagtgaacaaaatgtataaagaccgacaaggacgatttgacaggagcgtcgaaaagtggaggcgatttcattatgatattaagatttttaatcaatggttgacagaggctgagcaattcctgcggaaaacacaaattcccgagaattgggagcacgctaagtacaagtggtatctgaaagagttacaggacggcataggacaacgccagacagttgttaggacgttgaacgctacaggggaggagatcatacagcagagctctaagactgatgcttccatcctgcaggagaagcttggaagtctcaatctgaggtggcaggaggtgtgcaaacagctttcagacagaaagaaacgactcgaggagacactggagagactgcaggaattacaggaggcaaccgatgaactggatctgaaacttaggcaggccgaggttattaagggaagctggcagccagtgggggacctcttgatcgattctctacaggatcacttagaaaaggtaaaagctctcaggggcgagattgccccattgaaagagaacgtgtcccatgtgaatgacttggccaggcagctgactactttaggcattcagctctcaccctataatctatctacactagaggacctgaacactcggtggaaactgctgcaggtcgcagttgaagacagagtgcgccagctgcatgaagcccacagagactttgggccagcttctcagcactttttgtcaacatcggtccagggaccctgggaaagggctattagcccaaataaagtcccgtattatatcaaccatgaaacccaaaccacgtgttgggatcatcccaaaatgacggagttgtaccaatccctggcagacttaaataatgtccggttcagtgcataccggacagccatgaaactgcgtcggctccagaaagcactgtgtctcgatctcctttcactgagtgcagcatgcgacgccctggaccaacacaatcttaagcagaacgaccagcccatggatatcctgcagataattaattgtttaaccaccatctacgatcggctcgaacaggaacacaacaatttggtgaacgtacccctgtgcgtggacatgtgtcttaactggttgcttaacgtttatgacactggcagaacaggcaggattcgcgtgttgagcttcaaaaccgggatcatctctttgtgcaaggcccatttggaagacaaatacagatacttgttcaaacaagtggcctccagcacgggtttttgtgatcagcgcagactgggcctactgctgcacgatagcattcagattcctagacagctaggcgaagttgcttccttcggaggaagcaatatagaaccaagcgttcgatcctgtttccagttcgctaataataagcctgagatcgaggctgccctatttctggactggatgcgacttgagccccaatcaatggtgtggctgccggtgctgcacagagtggctgccgctgagacggcaaaacaccaggcgaaatgcaacatctgcaaggagtgtcctattattggcttcaggtacaggtctttgaaacacttcaattatgatatctgtcaatcttgtttttttagtggaagggtggcaaaaggacacaaaatgcattacccaatggtagagtactgcaccccaacaaccagcggggaggacgtacgcgattttgccaaagtgctcaaaaataagtttcggaccaagcgttattttgccaagcatccacgcatgggctatctccctgtccagactgtcttagaaggcgataatatggaaacagatactatg

SEQ ID NO: 251406 - DNA, 3432 bp, synthetic construct
  misc_feature 1..3432: note = Description of Artificial Sequence: Synthetic coding sequence
  source 1..3432: mol_type = other DNA
atgctatggtgggaggaagtcgaagattgttatgagagggaagacgtccagaagaagaccttcactaaatgggtaaatgcccagttcagtaaatttgggaagcagcacattgaaaatctgttttccgatctccaagacggacgtagactgctggatttgctggagggccttacggggcaaaaactcccgaaggagaaagggtccacacgcgtgcatgccctgaacaacgttaataaggcattaagggtgttgcagaataacaacgtcgaccttgtgaacataggtagcacggacattgtcgacgggaaccacaagctgacactcggtttaatctggaatattattttgcactggcaggtgaagaacgtgatgaaaaatatcatggccggccttcaacagaccaatagtgagaagatcctgttgagctgggtgcggcagtccacccgcaattatcctcaagtgaacgtgattaactttactacaagctggagcgacgggctggctcttaatgctctgatccacagtcacagacccgatctgttcgactggaactccgtagtatgccagcaaagtgctacgcagagactggaacacgcctttaatatcgcacgctatcagcttggtatcgagaagctgctggaccctgaggatgtggacacaacttacccagacaaaaagagcatcctgatgtacatcacaagcctgtttcaagtgctaccccagcaagtatccatcgaagctattcaagaagtggagatgttaccgagacctccaaaggtcacgaaggaggagcattttcagctccaccatcagatgcactactcgcagcaaattacggtgtcccttgcgcagggttacgagcgcacaagctcgccgaagccgcggttcaagtcttatgcctatacacaggcagcatacgttaccaccagtgacccgactcggtccccttttccaagccagcatttggaggcaccagaggataagagttttggaagttcgcttatggagtctgaagtgaacctcgaccgatatcagactgctctggaagaggttctaagctggctattatcggctgaggacaccctccaggcccagggtgaaatatcaaacgacgtggaagtcgtgaaggatcaattccacacccacgagggatacatgatggacctcacagcacaccagggcagggtaggcaatatactacagctcggttccaaactcatcggcaccgggaaactgagcgaagatgaggagactgaggtccaggagcagatgaaccttcttaattcgagatgggagtgccttagagtggcatctatggaaaaacaatctaacttgcaccgcgagatttcctacgtaccatccacttacctcacggaaatcacccatgtaagccaagcgcttctcgaggtggagcagttactgaacgcccctgacctctgtgccaaggacttcgaggacctgtttaaacaggaggagagtctcaagaatattaaggacagcctgcaacagagctccggccggattgacatcatacactcaaagaaaactgccgcattacagtccgcgacacctgttgaacgcgtcaaactccaggaggcgctgtcccagctggacttccagtgggagaaggtcaataaaatgtataaggacagacagggccggtttgaccggtcagtcgaaaaatggcgccgctttcactacgacattaaaatctttaatcaatggctgaccgaggcagagcagttcctccgcaaaacgcagatacctgaaaattgggagcatgccaaatacaagtggtaccttaaggagttgcaagatggcatcggccaacggcaaacagtcgtgcgaactctgaacgcaactggagaagaaattattcagcagagctccaagacagatgcgtccatccttcaggaaaagttgggaagcctgaatctgaggtggcaggaggtgtgcaaacagctttcagataggaaaaagcgtctagaagagacactggaacgcttgcaagaactgcaggaagctactgacgaactagatctaaagttgagacaagcggaagttattaagggaagctggcagccggtcggagatttactaatcgattctctgcaggaccacctggagaaggttaaagccctgagaggagaaatcgccccactgaaggaaaatgtgtcgcatgtgaacgacctggccaggcaactaacgacactgggcatccagctctccccttataacctttctaccctcgaggacctcaataccaggtggaagttgcttcaggtggctgtcgaggaccgcgtgcggcagctccatgaggcgcaccgggatttcgggcccgcttcgcaacactttctaagcaccagcgttcagggaccatgggagagggccatcagccctaataaggtgccctactatataaatcacgagactcaaaccacctgctgggaccaccccaaaatgacggagttgtatcaaagcctggctgacttgaataatgtccgcttcagcgcgtaccgcacagccatgaagctaagacgcctccagaaggccctttgcttggacctgttatccctgtcggccgcttgtgatgcactagatcagcacaatctaaaacagaacgatcaaccaatggatatactacagattatcaactgcctgacgactatctatgatagactagaacaggaacataacaatttggtcaatgtacccctgtgtgtcgatatgtgtctcaactggttgttgaatgtctatgataccgggaggacgggccgcatccgcgtgctgagctttaagactggtatcatttccctgtgcaaggcccatctggaggacaaatatcggtatctgtttaagcaggtcgcttccagtactggcttctgcgatcagcgcagattaggcctgctactgcacgacagcatccagatacccagacagctgggcgaagtcgcttccttcggagggtctaacattgagccatccgtgcgctcttgtttccagttcgcaaacaacaagcctgaaatcgaagctgccctcttcttagattggatgaggctcgaaccccaatcgatggtgtggctccctgtactgcacagggtcgccgctgctgagactgctaagcaccaggcaaaatgcaatatctgcaaggagtgtcctataatcggtttcaggtacagatccctgaagcactttaactatgacatttgccagagttgtttctttagcggtcgagttgccaagggacacaaaatgcattatcctatggtggagtactgtactcccaccacctctggagaagatgtgcgggattttgccaaagttttaaaaaacaagtttcgtacaaagagatactttgcaaagcaccctcgcatggggtacctaccggtccaaaccgtgttggagggcgacaatatggaaaccgacacaatg

SEQ ID NO: 251407 - DNA, 3432 bp, synthetic construct
  misc_feature 1..3432: note = Description of Artificial Sequence: Synthetic coding sequence
  source 1..3432: mol_type = other DNA
atgctgtggtgggaagaggtggaggattgctacgagcgcgaggacgtgcaaaagaaaaccttcactaagtgggtgaacgcgcaattctcgaagttcggcaagcaacacatcgaaaacctgttctcagaccttcaagatggacggcggctcctggacctgttggagggcctcactggtcaaaagctcccaaaggaaaaaggatcgactcgagtgcacgctctgaacaacgtgaacaaggcgcttcgcgtgctccagaataacaatgtggatctggtgaacatcggatcgaccgatatcgtggacggcaaccataaactgaccctgggactcatttggaatatcatcctgcactggcaagtgaaaaacgtcatgaaaaacatcatggccgggctccaacaaaccaactccgagaagatcttgctgtcgtgggtgcggcagtcaactagaaactacccgcaggtcaacgtgatcaatttcaccacctcctggtccgacggactcgcgctgaatgcactgatccattcgcataggccggatctcttcgactggaactcggtggtgtgtcagcagagcgccactcagagactggaacatgcattcaacattgctcgctaccaactgggcatcgagaaattgctggacccggaggacgtggacactacctacccagacaagaaatcaatcctgatgtacattacttcactcttccaggtgctgccccaacaggtgtccatcgaggctatccaggaagttgagatgctcccgcggccaccaaaagtgaccaaggaagagcatttccagcttcaccaccaaatgcactacagccagcagatcactgtgtcactcgcccaaggctacgagcgtacttcatcgcctaaacccaggttcaagtcttacgcttacacccaagccgcgtacgtgaccacctccgacccgactaggagccccttcccatctcagcacctggaggccccggaggataagtcattcggctcgtccctcatggaaagcgaagtcaacttggaccgctaccagactgcgttggaggaagtgctgagctggctgctgtccgcagaggacaccctgcaagcccagggggagatatccaacgacgtggaagtggtgaaggatcagttccacactcacgagggatacatgatggacctgaccgcgcaccaaggcagggtgggaaacatcttgcagctgggctcgaagctgatcgggactggaaagttgtcagaagatgaggaaaccgaagtgcaagagcaaatgaacctcctgaacagccggtgggaatgtctgcgcgtggccagcatggagaagcagtcgaacctgcaccgcgaaatctcatacgtcccttcgacctacctgaccgaaatcacccatgtgtcgcaggcactcttggaggtggaacaactgctgaatgcaccagatctgtgtgccaaggatttcgaggacttgttcaagcaggaggaaagcctgaagaatatcaaggattcgctgcagcaatcgtcgggaaggatcgacatcattcacagcaaaaagaccgccgccctgcagagtgccaccccagtcgaaagagtaaagctgcaggaagccttgagccagctcgatttccaatgggagaaggtcaacaagatgtacaaggaccggcagggacgcttcgatagatcggttgagaagtggagaagattccactacgatatcaagatattcaaccagtggctgaccgaagcggaacagttcctgcgcaagacccagattccggaaaactgggaacatgcgaagtacaagtggtaccttaaagaacttcaggacggaatcgggcagcggcagactgtcgtgcggactctcaacgcgacgggggaagagatcattcagcagtccagcaagactgacgcgtccatcctccaggaaaaactgggatcgctgaacctgaggtggcaagaggtgtgcaaacaactttcagacagaaaaaagcgcctcgaagaaaccctggaacgcctgcaggaactgcaggaggccacggatgagctcgacctgaagctgcggcaggccgaagtgatcaaagggtcctggcagccggtcggggaccttctgatcgactccctgcaggaccacctggaaaaggtgaaggccctgagaggagagattgcccctctgaaggaaaacgtgagccacgtcaatgacctggctcgccaactgaccactctgggtattcagctgagcccgtacaacctctccaccctggaagatctgaacaccagatggaagctgctgcaagtggcggtcgaagatcgcgtgcgccaactgcacgaggcccaccgggacttcggacccgcctcccaacacttcctgtcaacttcggtgcagggaccttgggagcgcgcaatctcaccgaacaaggtgccgtactacatcaaccacgaaactcaaaccacttgctgggaccacccaaagatgaccgagctgtaccagtcgcttgccgatctgaacaatgtgagattctcggcctatcggactgctatgaaactgcgcagactgcaaaaggccctgtgcctggaccttctgtcactgagcgcggcatgtgacgcgcttgatcaacacaacttgaagcaaaacgaccaaccaatggacatcttgcagatcatcaattgcctgactacgatctacgaccgcctggaacaggaacacaacaacctggtcaatgttcctctgtgtgtggacatgtgccttaattggctcctgaatgtctacgacactgggagaactggtcgcatccgcgtgctgtcgtttaagaccggcatcatcagcctgtgcaaagcacacctggaggacaagtacagatacctctttaagcaagtcgcctcgtcaactggtttctgcgaccagcggcggctgggcctgctgctgcacgatagcattcagatcccgcgccagctgggcgaggtggcgtctttcggcggatccaacatcgaaccgtccgtgcggtcctgttttcaattcgcaaataacaagcccgaaatcgaagccgcgctcttcctcgactggatgaggctggagcctcaatccatggtgtggctccctgtcctgcatagagtggctgccgccgaaaccgcgaagcaccaggccaaatgcaatatctgtaaagaatgcccaatcatcggattccggtaccgcagccttaagcatttcaactatgacatctgccagagctgcttcttctccggccgggtggccaaaggacataagatgcactacccgatggtcgagtactgcactccgaccacttccggggaggacgtccgcgactttgctaaggtgctcaagaataagttcagaaccaagaggtacttcgcgaagcatcctcgcatgggatacctgcccgtgcagaccgtgcttgaaggagataacatggagactgataccatg

SEQ ID NO: 251408 - DNA, 3432 bp, synthetic construct
  misc_feature 1..3432: note = Description of Artificial Sequence: Synthetic coding sequence
  source 1..3432: mol_type = other DNA
atgctgtggtgggaagaggtggaggactgttatgagagagaggatgttcagaaaaaaacatttacgaagtgggttaacgcgcaatttagcaagtttggcaagcaacacattgagaacctgttcagcgatttgcaggacggcaggaggttgctggacctcctggaaggtttgacgggtcagaagcttcctaaagagaagggctcaaccagggttcacgcgctcaataacgtaaacaaggctctgagggtattgcagaacaataatgtggacctggtgaatatcggcagtacagacattgtcgatggtaatcacaagctgaccctgggtttgatctggaacatcattctccactggcaggtcaaaaacgtgatgaaaaacattatggccggtctccaacaaaccaactccgaaaagattcttttgtcttgggttcgccagagcaccagaaactatccgcaggtgaatgtcatcaattttacgacctcatggagtgatggcctggccttgaatgcgcttatccatagccacaggcccgacctgttcgattggaacagtgtagtctgccaacagagcgctacccagagactcgagcacgcattcaatatcgcccgctatcagctgggtatcgaaaagctgcttgatccagaggatgtagacactacataccctgacaagaagagcatattgatgtatattactagtctctttcaggtactcccacagcaagtgtctatcgaggccatccaagaggtggagatgctcccaagaccaccaaaggtcacaaaggaggaacactttcaactgcaccaccagatgcactatagccagcaaatcacggtgtctttggcccagggctacgaaaggacctccagcccgaagcctcgcttcaaaagctacgcgtatacacaggctgcttatgtgaccacatctgacccgactcgctccccctttcccagccaacacttggaagctcccgaggataagagcttcggctctagcctcatggagtccgaggtcaatctggataggtaccaaacagcactggaggaagtcctctcctggctcctgtccgcagaggatacactgcaggcccagggagagattagcaatgatgtcgaggtggtgaaagaccagttccatacacatgagggatatatgatggatctgacagcacatcaaggtcgcgtgggaaacattttgcagcttggatctaagctgattggcacgggcaagctgagcgaagatgaggagaccgaagtgcaggagcaaatgaatcttctgaatagtcgctgggaatgcctgagggtcgcctcaatggagaaacagtccaacctgcatagagagatctcctatgttccctctacatatctgactgagataactcatgtttcacaagccttgcttgaggtcgagcagctgctcaatgcgccagacctctgtgcgaaagatttcgaagaccttttcaagcaggaagagtcactgaaaaatatcaaggattcactccagcagtccagtggtaggattgacatcatccactctaagaagaccgccgcgctccaatccgccacccctgttgagcgcgtaaagttgcaggaggctctttctcaactggactttcaatgggaaaaagtcaataaaatgtataaggacagacaaggtaggtttgacaggtcagttgagaagtggagaagatttcactatgacattaagatcttcaatcaatggctgacggaggccgagcaattcctgcgcaagactcagataccagagaactgggagcacgctaaatataaatggtacctcaaagagttgcaagacggcatcggacagaggcagacagtggtgaggactttgaatgcaactggagaagaaatcatccagcagagctccaaaactgatgccagtatccttcaagaaaagctgggaagcctcaacctgcgctggcaggaagtttgtaaacaattgagcgataggaagaagaggctggaggagacgctggaaaggttgcaggaactgcaggaagctaccgacgagctggacctgaagcttagacaggccgaggtcatcaagggttcttggcaaccggtgggcgatctgctgattgattccttgcaggatcacctggagaaggtaaaggccttgagaggcgagatcgccccattgaaggaaaacgtgagtcacgtgaacgacctcgccagacaactcaccacactgggtatccagctgtcaccttataacctgtcaaccctggaggatttgaacactaggtggaaactcctccaggtagcagttgaggatagggtgaggcagctgcatgaagcacacagggatttcggtccggcgagccagcattttcttagcacatcagtacagggaccgtgggaacgcgctatctccccaaacaaggtcccatactacattaaccatgagacccaaactacatgctgggaccacccaaaaatgaccgagttgtaccaatctctggctgatcttaacaacgtgaggttctccgcctacagaaccgccatgaaattgaggaggctccaaaaggctctgtgtctggatctcctgagtcttagcgcggcttgtgacgccctggaccaacataatctgaagcagaacgatcagcctatggacatactgcagattatcaattgcctcactactatctatgaccgcctggagcaagagcacaacaatctggtcaatgtccccctgtgtgtcgatatgtgcttgaactggctgctcaatgtgtacgatacaggcagaactggtaggattcgcgtgctctcctttaagaccggcatcatatctctctgtaaggctcacctggaagacaagtacagatacctctttaagcaagtggcctctagcacaggtttttgcgaccagaggaggctcggtctgctcctccatgactctatccagatccccagacaactgggcgaggtggcaagtttcggtggatcaaacattgagcctagcgtgaggtcctgctttcagttcgctaacaacaagcctgagatagaggctgcactgttcctggattggatgcgcctcgagccccaatccatggtgtggctccctgttctgcacagggtggccgctgctgaaaccgctaagcaccaggccaaatgtaacatttgtaaggagtgcccaataattggctttagatataggtctctgaagcacttcaactacgacatctgccagagctgtttcttttctggtagagtagccaagggccataagatgcattaccccatggtagagtactgtacccctacaacttcaggtgaagacgttagggatttcgccaaagttctgaagaataagttcaggaccaaacgctacttcgccaagcatcctcgcatgggttacctccccgttcagacagttctggagggagataacatggagactgacactatg

SEQ ID NO: 251409 - DNA, 3432 bp, synthetic construct
  misc_feature 1..3432: note = Description of Artificial Sequence: Synthetic coding sequence
  source 1..3432: mol_type = other DNA
atgttatggtgggaagaggtcgaagactgctatgagcgtgaggacgtccaaaagaaaacttttaccaagtgggtcaatgctcagttctcgaaattcggcaaacagcatatcgagaatctgttctccgacttgcaggatggtcggcgcctgcttgacttattggagggccttaccggccaaaaattgccgaaagagaaaggtagcacccgcgtgcacgcgttaaataacgtaaacaaggcgctgcgggtccttcaaaacaataatgtggatctggttaacatcggctctaccgacatcgtagatggtaatcataagctgacgctgggtttgatttggaacattatcctgcactggcaagtgaagaacgtaatgaagaatatcatggcgggtctgcagcaaacaaatagcgaaaaaattctgctgagctgggttcgccagtcaacccggaattatccgcaggtcaatgtgattaattttacaacatcctggtccgacggactggccctcaatgcactgatccactcccacaggccagacttattcgactggaattccgttgtttgtcaacagtcagctacccaacgtctggaacatgcttttaacatcgcccgctaccagctgggtatcgagaagctgctcgaccctgaggatgtggacactacttaccctgacaagaagtcaattctgatgtatattacttcgctcttccaagttttgccacagcaagtttccatcgaggccatccaggaggtggagatgctccctcgccctcctaaagtgactaaggaagaacacttccagctacaccatcagatgcattatagtcaacagataacggtctccctggcgcaaggttatgagcgtacatccagccctaagccgcgttttaaatcttacgcatacacccaggctgcgtacgtcacgacttccgatcctacgcgctcaccattcccaagccaacatctagaggcgccggaggacaagtctttcgggagctccctgatggagagcgaggtcaacctggatcgttatcaaaccgcccttgaagaagttctgagctggttgctgtcagccgaggacacgcttcaagcacagggggagatatccaacgatgttgaggtcgtgaaagatcaattccacacacatgaaggctatatgatggacctgaccgcacatcagggacgtgtaggtaacatcctgcagctgggttcaaagttgatcggtaccggcaaattgtctgaagacgaggaaactgaagtgcaggaacagatgaacctgctgaatagcaggtgggagtgcctacgcgtggcgagtatggagaaacagagcaatttgcaccgcgaaatttcctacgtgcctagcacctatctcactgagattactcacgtgtctcaagcgctgcttgaggtggagcaactgttgaatgcgccggatctgtgtgcaaaggattttgaggatctcttcaagcaagaggagagccttaagaatattaaggacagcctgcaacagagcagcggtcgcatcgatatcatccactcaaaaaaaaccgccgctcttcagtctgcgaccccagtcgagcgcgtgaagctgcaggaagcgctgtcccagctcgacttccagtgggagaaggtgaataaaatgtacaaagatcgccaggggcgttttgatcgcagcgtcgagaagtggcgcagattccactatgatattaagatttttaaccaatggctcacagaagccgagcagttcttgcgcaaaactcagatcccggagaactgggaacatgcgaaatacaagtggtatctcaaagagttgcaggatggtataggccagcgccagactgttgttcgaaccctgaacgcgacgggggaggagattattcaacaatcaagcaagactgatgccagcatcttgcaggagaaactgggtagtttgaacctgcgttggcaggaggtttgcaaacaattaagcgacaggaaaaaaagactcgaggagactctcgaacgattgcaggagctgcaggaggcaacagacgagttggatttgaagctgcggcaggccgaagtgattaaaggtagctggcaaccggtgggtgatctgttgatcgattcccttcaagatcacttggaaaaggtcaaggcgctccgtggcgaaatcgcaccgctaaaagagaatgtcagccacgtgaatgacctggctcgccagttaactaccttgggtatccagctgagcccctataatctcagcacgcttgaagatctgaatactcgctggaagctcttgcaggtggccgttgaagaccgcgtcaggcagttacacgaggcgcatcgcgattttggcccagccagccaacattttctgagcactagtgtgcagggcccatgggagagggcgatcagcccgaataaggttccatattatatcaatcacgagacccagaccacctgttgggatcaccctaagatgacagaactttatcagtctctcgctgatttgaacaatgtacggttcagcgcctaccgcacggcaatgaagctgcgccgcctgcaaaaagctttgtgcctcgatctgttgagcctgagcgcagcgtgcgacgcactggaccaacacaacttgaaacagaatgatcaaccaatggatatcctgcagattataaattgcctgactacaatctacgaccgcctcgagcaggaacacaataacctcgtcaacgtgccgctgtgtgtggatatgtgcctgaattggctacttaacgtttacgacacggggagaactggccgcatccgtgtgctatcatttaaaactggcatcatctccctgtgtaaagcgcacttggaagataaataccgctatctgttcaagcaggtcgcttctagcactggtttctgtgaccaacggcgcctagggcttctgctgcacgattctattcagatcccacgccaactgggcgaagtggcgtctttcggcggttctaatatagaaccttctgtgcgatcctgtttccaattcgccaacaacaaacctgagattgaagctgcattgttcctggattggatgcgcctggagccacagtccatggtttggctgcctgtgttgcaccgtgtggccgccgctgaaacagctaaacatcaggcgaaatgcaatatttgcaaagaatgcccgatcatcggattccgctatcgctctttgaaacacttcaactacgacatatgccagtcctgctttttttcgggacgcgtggctaagggacataaaatgcactaccctatggtggaatactgcacacctacgacctctggtgaagacgtccgcgacttcgccaaagtgttaaagaataaattcaggaccaagcgctactttgcaaagcatccgaggatgggttatctcccggttcaaactgtgctggaaggtgacaatatggagaccgacaccatg

SEQ ID NO: 251410 - DNA, 3432 bp, synthetic construct
  misc_feature 1..3432: note = Description of Artificial Sequence: Synthetic coding sequence
  source 1..3432: mol_type = other DNA
atgttgtggtgggaagaggtggaggattgttacgagagggaagatgtccagaaaaagacctttactaaatgggtcaacgcacaattttccaagtttggcaagcaacacatcgagaaccttttttcggatctgcaagatggacggaggctcttggatctcctcgagggtctgaccggacaaaagctgccaaaggaaaagggatccactagggtgcacgctctgaacaacgtgaataaagcgctgagagtacttcagaacaacaacgtggatctcgtcaacattgggagtaccgacattgtggatggaaaccataagctcaccctcggcctgatttggaacattatcttgcattggcaggtcaaaaacgtgatgaagaacatcatggccggcctccaacaaactaattccgaaaagatacttctttcctgggtgcgacagagcacccgcaactacccgcaagtgaatgtgatcaatttcacgacctcttggtcagacggacttgcactgaacgctctgatccattcccaccggcctgacctttttgattggaattctgtagtgtgccagcagtccgccactcagcgacttgaacacgcatttaacatcgcaagataccaacttggaattgagaaacttctggatcctgaggatgtggacactacctaccccgacaagaaatcgattctgatgtacattacctccctcttccaagttctcccacagcaagtctctatagaggcaattcaggaagtggaaatgctgcctcgacctccaaaggttactaaggaagaacattttcaactccatcatcagatgcattactctcagcagattaccgtatcgttggcacaaggttacgaaagaacgagctcaccgaagccccggtttaagtcgtacgcctacacccaggcagcctacgtgactacttccgatccaacgcggtcaccatttccatcacaacacctggaagcgccggaggacaagagctttgggtcatccctgatggaatccgaagtgaatttggatagataccaaactgcacttgaggaagtgctgagctggcttctctccgcagaggacacccttcaggcacaaggagaaatatcaaacgatgtggaagtggtgaaggatcagtttcatactcatgaaggttatatgatggaccttactgcgcaccaaggtcgcgtggggaatattctgcaactgggctcgaagctgattgggaccggtaaactttccgaagatgaggaaactgaagttcaagaacaaatgaacctgctgaattccagatgggagtgtctgcgtgttgcatcgatggaaaagcaatccaatcttcatcgcgaaataagctacgtgcctagcacctaccttactgagatcacgcacgtgtcccaagcacttctggaagtggagcagctcctgaacgcgccagatctttgtgcaaaggacttcgaagatcttttcaagcaggaggagtccctcaagaatatcaaggattcgctccaacagagctcgggacgaattgatatcatccattctaagaaaaccgccgccctccagtcagccacccctgtcgagagagtgaagctccaggaagcactgagccagctcgactttcagtgggagaaggtgaacaagatgtacaaagatagacaggggcgatttgatagatcggtcgaaaaatggcggaggtttcattatgacataaagatcttcaaccagtggttgaccgaagcagagcaatttcttaggaaaactcaaattcccgaaaattgggaacatgcgaagtacaagtggtaccttaaagaattgcaggacggaataggacaaagacagactgtggtccgaaccctgaacgcaacgggcgaagagattatccaacagtcaagtaagactgatgcatcgattcttcaagaaaaactgggatccttgaaccttcgttggcaggaagtctgtaagcaactgtcagaccggaagaagcgcctcgaagaaactctcgagagactccaagagcttcaagaagcaactgatgaacttgatttgaaactccgccaggccgaagtgattaaggggtcatggcaaccagtcggagatcttcttatagattcgttgcaagatcacctcgaaaaggtgaaggcactgagaggtgagattgccccacttaaagagaatgtgtcacatgtcaacgatcttgctagacagcttaccaccctgggtattcaactttcgccctacaatctttcgacccttgaggatctcaatactcgctggaagctgcttcaagtggcggtggaagatagggtacgtcagctgcacgaagcccaccgggacttcggtcctgcatcgcagcatttcttgagcacctcggtgcagggtccatgggaaagagccatttcacctaacaaagtgccgtactacattaaccatgaaacccaaacgacttgctgggatcaccctaagatgaccgaactgtaccaatcgctcgcagatctgaacaatgtcagattttcggcatatagaaccgccatgaagctccggagacttcagaaagcactctgcctggatctgctgtcactctcagcagcctgtgacgccctcgaccaacataatctgaaacaaaacgatcaaccgatggacatcctgcagattatcaactgccttactaccatatacgatcgccttgaacaggagcacaataaccttgtcaatgtgccattgtgtgttgatatgtgtctgaactggctcttgaacgtttacgacactggacggacgggaagaatcagagtcctctcgttcaaaaccggtatcatttccctgtgcaaagcacatctggaggacaaatacaggtaccttttcaagcaagtagcttcgagcaccgggttttgcgaccaacggaggctggggttgctgcttcacgactccatccagatcccccgtcagctcggagaggtggctagcttcggcggcagcaatattgaaccaagcgtgcgttcctgttttcaattcgcgaacaataagcctgaaatcgaagcggcactttttcttgactggatgagactggaacctcaatccatggtttggttgccggtgctgcatcgggtggcggcggcagaaaccgcgaagcatcaagcaaaatgcaacatttgcaaggagtgtcctatcattggatttcgctaccggtccctgaaacatttcaactacgacatttgtcaaagctgtttcttttcgggtagggtggccaagggccacaagatgcattaccccatggtcgaatattgtacgcctactacctctggtgaggacgtgcgcgattttgcaaaagtgctcaagaataagttccgtactaagcgctacttcgctaaacatcctcgcatgggatacctccccgtccagaccgttctggaaggagacaacatggaaacggacactatg

SEQ ID NO: 251411 - DNA, 3432 bp, synthetic construct
  misc_feature 1..3432: note = Description of Artificial Sequence: Synthetic coding sequence
  source 1..3432: mol_type = other DNA
atgctgtggtgggaggaagtggaagattgctacgagcgagaggatgtccaaaagaaaacgtttactaagtgggtgaatgctcaattctcaaagttcggaaagcagcatatcgagaatctctttagcgacctgcaggacggacgccggctcctcgatctgctggaaggactgaccgggcagaagctgccgaaagagaagggatcaactagagtgcacgccctcaacaacgtgaataaggcacttcgggtgctgcaaaacaacaatgtagatctcgtcaacattggatcgactgacatcgtcgacgggaatcacaagttgaccctgggacttatctggaatatcatccttcactggcaggtgaagaacgtgatgaagaatatcatggccggtctgcaacagaccaactccgagaaaattctcctgtcttgggtgagacagtcgactcgcaattacccacaggtcaacgtgatcaacttcacgacctcgtggagcgatgggctggcccttaacgcccttatccactcccaccgcccggatttgttcgactggaatagcgtggtgtgccagcagtccgctacgcagagacttgagcatgcatttaacatcgcacgctaccaactggggattgaaaaactgttggatcctgaagatgtggacaccacctaccctgacaaaaagagcatcctgatgtatatcacgtccttgttccaagtcctgccgcaacaggtgtcaattgaggccatccaggaggtcgagatgctgccacgccctccaaaggttaccaaagaagaacacttccagctgcaccaccagatgcactattctcagcaaatcaccgtgtctctcgctcaggggtacgagcgcacctccagcccgaagccaagatttaagagctacgcatacactcaagcggcctatgtgaccacctccgacccgactcgcagcccgttcccttcgcagcacttggaggcgcctgaagataaaagtttcggctcatccctgatggagtctgaggtcaatctcgaccgctatcagactgcgcttgaagaagtgctgtcctggctgttgtctgccgaggacaccctccaagcgcaaggcgagatctcgaatgatgtggaggttgtgaaagaccagttccatactcacgaaggatacatgatggatctgactgctcatcagggacgcgtgggaaacattctgcagttgggaagcaagctgattggcaccgggaagctgagcgaggacgaagaaaccgaggtgcaggagcagatgaacctgctgaactcgcgctgggaatgtcttagagtggcctccatggaaaagcagtctaatctccatcgggaaatctcatacgtgccgtccacttacctcactgaaatcacccatgtttctcaggcacttctggaggtggaacagctcctgaatgctccggacctgtgcgctaaggacttcgaggatctgttcaagcaggaggaatcgcttaagaacatcaaggactcactgcagcaatcaagcggccggatcgatatcatccatagcaaaaagactgccgcgttgcaaagcgcaactcctgtggagcgggtgaagctccaagaagcactgtcccagctggatttccagtgggaaaaagtcaacaagatgtacaaggatcggcaggggagattcgacaggagtgtcgaaaagtggaggcgtttccactacgacatcaaaatctttaaccaatggctcactgaggctgagcaattcctgcgcaaaacccagatcccggagaactgggaacatgccaagtacaagtggtaccttaaagaattgcaagatggcatcggtcaacggcaaacggttgtccggaccctcaacgcgactggagaagaaatcattcagcaatcgtctaagaccgacgcaagtattctccaggaaaaactggggtcgctcaacctcagatggcaggaggtctgcaaacagctgtctgacaggaagaagagactggaagaaaccctcgaacgtttgcaggaactccaggaagcaaccgacgagctcgaccttaaactgcggcaggccgaagtgatcaagggatcctggcaaccggtgggggacctcctgatcgactcgctgcaggaccacctggaaaaggtgaaggcgttgcggggagaaattgcacccctgaaggagaacgtgtcccacgtgaatgatctggcccggcaactgaccactcttggaatacagttgagcccgtacaatctttccaccctggaggacctgaacactaggtggaagctcctccaagtcgctgttgaggaccgagtccgccagctgcacgaagcccatcgcgatttcggtcctgcgtcgcaacactttctgtccacctccgttcaagggccttgggaacgcgcaatcagcccaaacaaagtgccatactacatcaaccatgaaactcaaaccacttgttgggaccacccgaagatgactgaactctaccaatcactggcggatctgaacaatgttcgcttttccgcttaccgcaccgcaatgaagttgcgaaggctgcagaaggcgctctgcctggatttgctctcgctgagcgctgcctgtgatgcactggaccagcataatcttaagcagaacgaccaacccatggacattctccagatcataaactgtctgaccactatctacgatagactggaacaggagcacaacaacctggtcaacgttccgctctgcgtggacatgtgcctgaattggctcctcaatgtgtacgataccggaaggaccggacggatcagagtgctgtcctttaagacggggataatctccctgtgtaaagcgcatcttgaagataagtataggtacctgttcaaacaggtggcatcgtccaccggtttttgcgaccaacgccgcctcggactcctgctccacgattcaatccagatcccccggcaactgggcgaagtcgcttcctttggaggatcaaatatcgaaccatccgtgcgctcctgttttcagttcgccaataacaagcccgaaatcgaggccgcgctcttcttggattggatgcggctggagccgcagtccatggtgtggctgcccgtactccatcgggtggccgcggccgagacggccaagcaccaagccaagtgcaatatctgcaaggaatgcccgatcatcgggttccgctaccggtcgctgaagcacttcaactacgacatctgccagagctgcttcttcagcggcagggtggctaaaggccacaaaatgcattacccgatggtcgagtactgcaccccgactactagcggcgaggacgtgagagacttcgcgaaggttttgaagaacaaattcaggactaagagatacttcgctaaacatccaagaatgggatacttgcctgtgcaaactgtgctggaaggcgacaacatggaaaccgatactatg

SEQ ID NO: 251412 - DNA, 3432 bp, synthetic construct
  misc_feature 1..3432: note = Description of Artificial Sequence: Synthetic coding sequence
  source 1..3432: mol_type = other DNA
atgttgtggtgggaggaggtagaggactgctatgaaagggaggatgtgcagaagaagacatttacaaaatgggttaatgcccagttttccaagttcggtaaacagcacattgagaacctgttctcagacctgcaggatggtcgccgcctccttgaccttctggaaggtcttaccggtcagaaactgcctaaggagaagggctctactcgcgtgcacgccctgaacaacgtaaacaaggcccttagagtgcttcagaacaacaacgttgaccttgttaacatcggctctactgatatagttgacggcaaccacaagcttaccctgggactgatttggaatatcatcctgcattggcaagtgaagaacgtcatgaagaatatcatggctggccttcagcagacaaactccgagaaaatcctgctttcttgggtcagacaaagcacacgtaattaccctcaggttaatgttatcaatttcaccacaagctggagtgacggtctggctctcaacgcactcatacattcccatcgtccagacttgttcgactggaactccgtagtatgtcagcaaagcgcaactcagcgccttgaacatgctttcaacatcgcccgctaccaactgggaattgagaagctcctggatccagaggatgtggacaccacatatccagataagaagtccatccttatgtatatcacatctctgttccaggtcctgccacagcaggttagcatcgaggcaattcaagaagtcgagatgttgccacgtccacctaaggtgaccaaagaagagcatttccagttgcatcatcaaatgcactactcacagcagataacagtctctctcgctcagggttacgaaaggacctcctctcccaaacctcgtttcaaatcttatgcttacacacaagctgcctatgtaaccacatccgaccctactagatccccttttccatcacagcacttggaggctcccgaagacaagtccttcggatcttccttgatggaatccgaggtgaaccttgatcgctaccagaccgccctggaagaggttctgtcctggctgctttcagcagaggatactttgcaggctcagggagagatttcaaacgacgtggaggtggttaaagaccaatttcacacccacgaaggttacatgatggaccttactgctcaccagggacgcgtgggtaatattctgcagttgggcagcaaacttatcggaaccggaaaactgtccgaagacgaggaaaccgaggttcaggagcagatgaacctgctcaattcaaggtgggaatgtctgcgtgtggcttccatggagaagcagtctaacttgcatcgtgagatttcctacgtgccctctacttacctcaccgagataacccatgtgtcacaggcattgttggaagtcgaacagctgctcaatgcacctgacttgtgtgctaaagacttcgaggatctttttaagcaggaggaaagtctcaagaacattaaggactccttgcagcagtcttcaggccgtatcgatattatccacagcaagaaaaccgctgcccttcagtctgctactcctgttgagagggtaaagctgcaggaagccttgagtcagcttgacttccaatgggaaaaggtgaataagatgtataaagatcgtcaaggaaggttcgataggtcagtcgagaaatggcgcaggtttcactatgacatcaaaatcttcaaccagtggcttaccgaggctgaacaattcctccgtaagacacagattccagagaattgggaacatgcaaagtacaaatggtacctgaaagagctgcaggacggtattggtcagaggcagactgtggtgagaaccctgaatgcaaccggtgaggagataatccaacagtcctccaagaccgatgcatccatccttcaggagaagttgggcagtttgaatttgagatggcaggaggtctgtaagcagttgtccgataggaaaaagcgcttggaggaaaccttggagaggttgcaagagctgcaggaggcaacagacgaactggatctcaaattgaggcaggccgaggttataaaaggctcctggcagcctgtcggcgacttgttgattgactccctccaggaccacctcgagaaggtaaaggccctgcgcggcgagattgccccccttaaggagaatgtttctcatgttaatgatcttgcccgtcagctcactaccttgggcatacaactctcaccttacaatctctcaactttggaggacctgaatacacgctggaagctgctgcaggttgcagtggaagatagggtccgccagctgcacgaggctcaccgcgacttcggaccagcctcacagcacttcttgtccacctctgtgcagggcccttgggagcgcgctatatcccctaacaaagtgccttactatataaatcatgaaactcagacaacttgttgggaccaccctaagatgacagagctgtaccagagtctggctgatctgaataatgtccgcttttctgcctataggacagcaatgaagcttcgcaggctgcaaaaggcactgtgcctcgacttgctgagcctgtccgctgcctgtgacgctctggatcagcacaatcttaagcagaacgaccagcctatggacattctccagataatcaattgccttaccaccatctacgaccgtctggaacaggagcacaataatctcgtgaacgtgcccctgtgcgtggacatgtgtcttaattggctgctgaatgtgtacgatactggtagaacaggacgcattagagtcctgtctttcaaaacaggaattatcagcctctgcaaagcccacttggaggacaagtaccgttacctcttcaagcaagttgccagcagcaccggattctgtgatcagcgtagactgggcttgcttctccacgactcaatccagatccctaggcagcttggagaagtggcctccttcggaggctccaatattgagcccagcgttcgttcctgctttcagtttgctaacaataagcccgagattgaagcagccttgttcttggactggatgagacttgagccccaaagcatggtttggctgcccgtgcttcaccgtgttgctgccgcagaaaccgccaaacatcaggccaagtgcaacatatgcaaggagtgtccaataatcggcttcagatacaggtccctgaaacacttcaattacgatatctgtcagagttgtttcttctctggaagagtggctaagggacacaagatgcactaccccatggtcgagtactgtactcctaccacatccggagaggatgtgagagacttcgctaaggtgcttaagaataagttcaggactaagcgctactttgctaagcatccccgtatgggctatctgccagtgcagacagtgctggagggagacaacatggagacagacacaatg

SEQ ID NO: 251413 - DNA, 3432 bp, synthetic construct
  misc_feature 1..3432: note = Description of Artificial Sequence: Synthetic coding sequence
  source 1..3432: mol_type = other DNA
atgttgtggtgggaagaggtggaggattgctatgagcgggaggacgtacagaaaaagacgtttactaagtgggtgaacgcgcagttctccaagttcggaaagcagcacatcgaaaacttgttcagcgacttgcaagacggccgccgactcctggatctgctggagggcctgaccggacagaaactgcccaaagaaaagggatcgacccgtgtccatgctctgaacaatgtcaataaagcgctgcgcgttctccaaaacaacaacgtggacctcgtgaatatcggatccactgatatcgtggacggcaatcacaagctcaccttgggtcttatctggaatatcatcctccactggcaggtgaagaacgtaatgaagaatatcatggcgggactgcaacagaccaactcagaaaagatcctcctgtcgtgggtcaggcaatccactcgcaactacccgcaagtcaacgtgatcaacttcacgacttcgtggtcggatggcctggcactgaacgcgctgatccactctcacagaccggatctcttcgattggaactcagtggtgtgccagcaatccgcgacccagcgcctggagcatgcattcaacatcgcccgctaccagttgggcatcgaaaagctcctcgacccagaggatgtggacaccacctaccccgacaagaaatcgattctcatgtacatcacttccctgtttcaagtgcttccgcaacaagtctcaatcgaagcaatccaagaggtcgaaatgcttccacgtccaccaaaagtgacgaaggaggagcacttccagctgcatcaccagatgcactactcacaacagattacggtgtctctcgcgcaaggttacgaacgcacgtcaagccctaagccgcgctttaagagctacgcttacactcaggcggcctacgtgaccacctccgaccctacgagatcaccgtttccgagccaacacttggaagcacctgaagataaatccttcggatcgtcgctcatggaaagcgaggtcaatctcgaccggtaccagactgcccttgaagaggtgctgtcatggctgctctcagcagaggatactctccaggcccagggggagatcagcaatgacgtggaggtcgtgaaggaccaattccacactcatgaagggtacatgatggacctgactgcccatcagggacgggtgggcaacatcctccagcttggatcaaagctgattggcactggcaagctgagcgaggatgaggaaactgaggtccaagagcagatgaacctgctgaactccagatgggagtgtctgcgcgtggcctcgatggaaaagcagtcaaatctgcaccgggaaatctcgtacgtgcctagcacttacttgacggagatcactcatgtgagccaggccctgctggaggtggaacagttgctgaacgcaccggacctgtgcgccaaggatttcgaagatcttttcaagcaggaggaatcactgaagaacattaaggactccctgcagcaatcgtccggccgcatcgacatcattcatagcaaaaagaccgccgctctccaatcggcaactcctgtggagcgggtgaagctgcaggaagcactctcacagctggatttccagtgggagaaggtgaacaagatgtacaaagatcgccagggaaggttcgaccgcagcgtcgaaaaatggcggagatttcattatgacataaagatattcaaccaatggcttaccgaggccgagcagttcctgcgcaagactcagatcccagagaactgggaacacgccaagtacaagtggtacctcaaggaactgcaagatgggatcgggcaacgacagaccgtggtgagaactctcaacgccaccggagaagagattattcagcaatcatcaaaaacggacgcttcaatcctccaagaaaaactgggaagcctgaacctgagatggcaagaagtgtgcaagcagctctcggaccgcaaaaagaggctggaggagactctggaacgactccaagaactgcaggaagcgactgacgaactcgatctcaagctgaggcaagccgaagtgatcaagggatcgtggcagcccgtcggcgacctgctcattgatagcctccaggaccacctggaaaaagtcaaggctctgaggggtgaaattgcgcccctgaaggagaatgtttcgcacgtgaatgacctggcacgccagctgactactctggggatccagctgtctccgtacaatctctcaacgctcgaagatctgaacacccgctggaaactgctgcaggtggctgtcgaagatagagtcagacaactccacgaagcacacagggatttcggaccggcatctcagcattttctctcaacttcagttcagggaccttgggagcgagctatctccccgaacaaggtgccgtactacatcaaccacgagactcagactacgtgctgggaccacccaaaaatgaccgaactgtaccagtccctggcagacctgaataatgttagatttagcgcctaccggacggcaatgaagctgcgcagattgcagaaagcgctctgtctggatctcttgtccctctctgccgcctgcgacgcacttgatcaacacaatctgaaacagaacgaccagccaatggacatcctccagatcatcaattgtcttaccactatctatgatcgcctggagcaggaacacaataacctcgtcaacgtcccgctgtgcgttgacatgtgtctgaactggctgctgaatgtctacgacactgggagaactggacgcattcgcgtgctgtcgttcaaaacggggattatcagcctgtgtaaggcccatctggaggataagtatcgatacctgtttaagcaagtcgcctccagcactggcttctgcgatcagcgccgcctcggactgcttcttcatgactcaatccagatccctagacaactgggtgaagtggcatcgttcggcggatctaatatcgagccgagtgtgcggtcatgcttccagttcgccaacaataaaccagagatcgaggctgcactgtttttggactggatgcgccttgagccgcagagcatggtctggctgccggtgctccacagggtggccgccgcggagacggccaagcatcaagctaagtgcaacatttgcaaggaatgcccgatcattggattccggtaccgctccctgaagcatttcaactacgacatctgccagagctgtttcttcagcggaagggtggccaaaggccacaaaatgcattacccaatggtggaatactgcacccctacgacctcgggtgaagatgtgcgcgacttcgccaaggtgctgaagaacaaattccggaccaagcgctacttcgcgaagcacccacgcatggggtacctgccggtccagactgttctggagggtgataacatggagacggatactatg

SEQ ID NO: 251414 - DNA, 3432 bp, synthetic construct
  misc_feature 1..3432: note = Description of Artificial Sequence: Synthetic coding sequence
  source 1..3432: mol_type = other DNA
atgctgtggtgggaagaagtggaagattgctacgagcgcgaagatgtgcaaaagaaaacgttcactaaatgggtgaacgctcagtttagcaaatttggaaagcaacacatcgagaatctgttctcagatctccaagatggccgaaggcttcttgacctgctcgagggactcaccggtcaaaagttgcctaaggaaaagggatccaccagagttcacgcactgaataatgtgaacaaggcactgcgggtgttgcaaaacaacaatgtggacttggtgaacattggatcgaccgacattgttgatggcaatcacaaattgactctcggactgatatggaatatcattctccactggcaagtgaagaacgtcatgaagaacattatggcaggactgcaacaaacgaactccgagaagattctgctgtcatgggtgcgtcagtcgactcgcaactaccctcaagtgaacgtgattaactttaccacttcctggtctgatggccttgcactgaatgccctcattcatagccatcgtcccgatctgtttgattggaacagtgtggtgtgtcagcaaagcgcaactcaacgcctcgagcacgcatttaacatcgcacggtaccaacttgggatagagaagctccttgatcccgaggatgtggatactacgtaccccgacaaaaagtcgatcctgatgtatatcacttccctgtttcaagtcctgccacagcaggtgtccattgaagccattcaagaagtcgaaatgctcccaagaccaccaaaggtgactaaagaagaacactttcaactgcatcatcaaatgcattactcccaacagatcacggtgtcactggcacaaggatatgaaaggacctcgtctccgaagccccgttttaagagctacgcatatacccaggcggcctatgtgactaccagcgaccctacccgtagcccttttcctagccagcatcttgaggcaccggaagataagtcctttggtagctcattgatggagtccgaggtgaaccttgatagataccagactgcactggaagaggtgcttagctggctcctgtcggcggaggacacgctgcaagcccagggtgaaattagcaacgatgtggaagtggtgaaagaccaattccatacccatgagggctacatgatggatctcactgcccatcaaggtagggtgggaaacatcctccaactcggatccaaactgatcggcactggaaaactttcagaagatgaagaaacggaagtccaagaacagatgaatctgctgaactcgcgctgggagtgtctgcgcgttgccagcatggaaaaacaaagcaatctgcatcgtgaaatctcctacgtgccttcaacctacctgaccgaaatcacccacgtgtctcaggcattgcttgaggtggaacaactgctcaacgcaccggatctctgtgcaaaagatttcgaggacctgttcaagcaagaagagtcgctgaagaacataaaagatagcctccaacagtccagcggcagaatagacatcatccactccaaaaagactgctgcgcttcaatcagcgacccctgtggagcgagtcaagctgcaagaagcgcttagccagctggattttcaatgggaaaaggtaaacaagatgtacaaggaccgccaaggaagatttgatagaagcgtggaaaagtggcggagattccactatgatatcaagatattcaatcaatggcttactgaggccgagcagttccttcgcaaaacgcagattcccgaaaattgggagcatgcaaagtacaagtggtaccttaaggagctgcaagacggaatcggccaacggcagaccgtcgtgcgcactcttaatgcaaccggagaggaaatcattcaacaatcgagcaaaactgatgcgtccattcttcaagagaagttgggcagcttgaacctgagatggcaggaagtgtgtaagcagctctcggatcgtaagaaacggctggaagaaactctcgagcggcttcaagagttgcaggaggcaacggatgaactggatcttaagctcagacaggcagaagtcatcaagggatcgtggcagcctgtcggtgatctgctcattgactcgttgcaggaccatctggagaaggtcaaggcgctgcgtggagaaattgccccgcttaaagaaaacgtgtcccacgtgaacgacctggccagacaacttaccaccttgggaatccagctgtccccgtataacctttcgaccctggaagatttgaacacgaggtggaaacttctccaagtcgcagttgaggaccgagtccgacagcttcacgaagcgcacagagactttggccccgcctcgcagcatttcctcagcacctcagtacaagggccttgggaaagagcgatcagcccgaataaagttccatactacatcaatcatgaaacccagactacgtgttgggaccatcctaagatgaccgagctttaccagtccctcgcagatttgaataatgttagattttccgcttacaggacggcgatgaaacttcgcagactccagaaggccctgtgccttgatctgctttcactgtcggcagcttgtgatgcactggatcaacataacctgaaacaaaacgatcaaccaatggacattcttcagatcataaactgcctgaccactatttacgatcgccttgaacaggaacacaacaaccttgtgaatgtgcctctgtgtgtcgatatgtgtcttaactggcttctcaatgtgtacgacacgggacggaccggtagaattcgggtgttgtccttcaagaccgggattatctcgctttgcaaggctcacctggaggacaagtacagatacctgtttaagcaagttgcctctagcaccggattttgtgatcaacgtaggcttggcctgctgctgcatgattccatacaaataccacggcaacttggtgaagtggcgtccttcggcgggtccaacatcgaaccttcggtccgcagctgctttcagttcgcaaataacaagcccgagattgaggcagcattgtttcttgactggatgagactcgagccccagtcaatggtctggcttccagtgttgcatagggtggctgcagcggaaaccgccaagcatcaggcaaaatgcaacatttgcaaagagtgtcctataatcggattccgctacagatccctgaagcatttcaattacgacatatgtcaaagctgttttttctcgggtagagtcgcaaaggggcacaaaatgcattacccaatggtggaatactgcacccctaccacgtcaggcgaggatgtccgagatttcgccaaagtcctcaagaataagtttagaaccaagcgttactttgcaaagcacccacggatgggataccttccggtgcagaccgtcctggagggagataacatggagactgacacgatg

SEQ ID NO: 251415 - DNA, 3432 bp, synthetic construct
  misc_feature 1..3432: note = Description of Artificial Sequence: Synthetic coding sequence
  source 1..3432: mol_type = other DNA
atgctgtggtgggaagaagtcgaggattgctacgaaagggaggacgtgcagaagaaaactttcaccaaatgggtgaacgcccaattctcgaagttcggtaagcagcacatagaaaacctgttttcagatcttcaggacggacggagactccttgacctcctggagggtctgactggtcaaaaactgcctaaggaaaaaggttcaacgcgagtgcatgcgctcaataatgtcaataaggcacttcgcgtgctgcagaataacaacgtcgacttggtgaatatcggctctactgatattgtggatggtaaccacaaacttacgctgggactgatttggaacattattctccattggcaagtgaagaatgtgatgaagaacataatggccggactgcaacagacgaatagcgaaaagatactgctttcgtgggtgcgacaatccactaggaattatccacaggtgaacgtgataaacttcactacgtcctggagcgacggtcttgcccttaacgcacttatccatagccatcggccagatctttttgactggaacagcgtcgtttgccaacagtccgcaacccaacgcctggagcacgctttcaacattgcacgctaccaacttggcatcgaaaagctgcttgatccagaagatgtcgacaccacctacccggacaagaagtccattctgatgtacattacttcgctttttcaagtcctcccccagcaagtgtcgatcgaagctatccaagaagtggaaatgctgccaaggccacctaaggtgactaaggaagagcattttcagctgcaccatcaaatgcattacagccaacaaataactgtgtcgctggcccaaggatatgagcggacgagcagcccaaaacctagattcaagtcgtacgcatacactcaagccgcatatgtgactacctcggatcccaccaggtcaccattcccatcgcagcatcttgaggcccccgaagataagtcattcggatcgtcgcttatggagagtgaggtcaatctggatcgttaccagactgccctggaagaagtgctgtcgtggctccttagcgccgaagatacccttcaggctcaaggtgaaatttcgaacgatgtagaagtcgtgaaggaccaattccatactcatgaggggtacatgatggacctgactgcgcaccagggacgagtgggaaacatcctccagcttggatcaaagctgatcggcaccggtaaactcagcgaagatgaggagactgaagtgcaggaacagatgaacctgctcaattcacgttgggaatgtcttagagtcgcctcaatggagaaacagtcgaacctgcatagggagatatcctacgtgcctagcacgtacctgactgaaattactcatgtctcgcaagccctgcttgaagtggaacaactgcttaacgcgccagatctctgcgctaaggatttcgaggacctctttaagcaagaggaatcactcaaaaacattaaggactcgctgcagcagtcctcaggccgtatcgatatcatccattcaaagaaaaccgcggcactgcaatctgcaacccctgtcgaaagagtgaaacttcaagaggctctttcccaattggacttccaatgggaaaaagtcaataagatgtacaaagatcggcaaggccgtttcgatcgctcggtggaaaagtggaggcgcttccattacgatatcaaaatctttaaccagtggctgaccgaagcagaacaatttctgcgcaaaactcagatccctgaaaactgggaacatgcaaagtacaaatggtaccttaaggaactgcaggatggtattggccaaagacaaaccgtcgtgagaactcttaacgcaacgggtgaggaaatcattcagcaatcttccaagaccgatgcatcgatccttcaggaaaaactgggaagcctgaacctgaggtggcaggaagtgtgtaagcagctctcggatcgcaagaagcgcctggaagagactcttgaaaggctccaggagctgcaagaggccactgatgaattggatctgaagctgcgtcaggccgaggtgatcaagggttcctggcagcctgtgggtgatctgcttattgatagccttcaggaccacttggagaaggtgaaagcactgcgcggcgagattgccccacttaaggagaatgtgtcgcacgttaacgatcttgcacgccaactgaccaccctcggcattcaactttcgccctacaacttgtcgactcttgaagatcttaacacccgctggaagctgttgcaggtcgcagtcgaagatagggtccgccaacttcacgaagcacatcgtgattttggaccagcttcacaacattttctctcgacgtccgtgcagggcccatgggaaagagcaatctcaccgaacaaagtgccgtactatatcaatcatgaaactcagacgacctgttgggatcaccccaagatgacggagctgtaccaatcgcttgcagacttgaataacgtcaggttttcggcatacagaactgcaatgaagctcaggagactccagaaagccctctgcctcgacctgcttagcctgtccgcagcctgtgacgcgttggatcagcacaatctgaagcaaaacgaccaacctatggatattctgcaaatcattaactgcctgactaccatctacgatcggctggaacaggagcataacaacctggtgaatgtccctctctgcgtggatatgtgtcttaactggcttctgaatgtgtacgataccggacgcaccggccgcattcgggtgctctcgtttaagaccggcatcatttcactgtgcaaggcccatctggaggataagtatagatacctcttcaagcaagttgcatcttccaccgggttttgtgatcagagacgcctgggactgctgttgcatgactcgatacaaatcccccgacagctgggtgaagtggccagctttgggggatcaaacatcgaacctagcgtgcgtagctgctttcagtttgcaaacaacaaacctgaaattgaagccgctctgtttcttgattggatgcgacttgaacctcaatcgatggtttggctcccggtgctgcatagagtcgcggcagcagaaacggctaagcatcaagctaagtgcaacatctgtaaggaatgtccgattattggttttaggtacagatcgctcaagcatttcaattacgatatttgccaaagctgttttttctcgggaagagtggcgaagggccacaaaatgcattaccctatggtggagtactgtacccctaccactagcggcgaagatgtgcgggactttgccaaggtccttaagaacaagtttcgtaccaagcgatactttgcaaaacatcctcggatggggtacctcccagtgcagaccgtcctcgaaggtgataacatggaaaccgacactatg

SEQ ID NO: 251416 - DNA, 3432 bp, synthetic construct
  misc_feature 1..3432: note = Description of Artificial Sequence: Synthetic coding sequence
  source 1..3432: mol_type = other DNA
atgttgtggtgggaagaagtggaggattgctatgagagggaggacgtgcagaagaagacctttacaaagtgggttaacgcccaattctctaaattcggcaaacaacacatcgagaatctgtttagcgatcttcaggacggacgacgactgttggacctgttggagggcctcactggtcagaagttacctaaggagaagggttccacaagagtgcatgccctcaataacgtgaacaaggcgcttagggtgttgcagaacaataacgtggatctcgttaacataggcagtactgacattgtggatggaaatcacaaactcaccttaggactgatctggaatataatccttcactggcaggtgaagaacgtgatgaagaatatcatggcgggactgcagcagaccaacagcgagaagatcctactatcctgggtgcgtcagagcactaggaattacccgcaagtgaacgtgataaacttcactacgagctggtccgacggactggcactcaatgctctcattcactcacataggccggacctgtttgattggaatagtgttgtgtgccagcagagtgccactcaacgactagaacacgcattcaacattgcaaggtatcaacttggcattgagaaactgctcgacccggaagacgtggacactacataccccgataaaaagtctatcctgatgtacattacttcactttttcaagtgttgcctcagcaggtgagcatagaagcaatacaggaagtcgagatgctgccacgtccacccaaagttaccaaggaggagcacttccagttgcatcatcagatgcattacagccaacagattacagtgtcattggctcagggatacgaacgtacctcatctcccaaacccagatttaagagttacgcgtacacacaggccgcgtacgtcaccacctcggatcccaccagaagccctttcccctcccagcatctcgaggctcccgaggacaagtccttcggcagttctctcatggagtccgaagtaaatctggatagataccagacagccctcgaagaagtgctctcatggctcctctcagctgaagacacgttgcaggcacagggcgaaatatctaacgacgtcgaggtggttaaggatcagttccatacccatgaaggctatatgatggatctgacagcccaccaaggccgcgtcggtaatatcctgcagctgggttccaagttaattggcacaggcaagctgtcagaggacgaggagacagaagtacaagagcagatgaacctgctcaatagcagatgggaatgtcttagggtggcttcaatggagaagcaatctaatttgcatagggagatctcgtatgtgccctccacctaccttaccgaaattacccacgtgtcccaggcactactggaggtggaacaactcctaaatgcccctgacctctgtgctaaagatttcgaagacttgtttaagcaagaggagagcctcaaaaacataaaggatagtcttcagcaatcttcaggcaggatcgatattatccattccaagaaaacagcagcacttcagtcagctacacccgtagaaagagtcaaattgcaagaagctctgagccagctggactttcaatgggagaaggtgaacaagatgtacaaggacaggcagggacgttttgatcgttccgtggagaagtggaggagatttcactacgacataaaaatatttaatcagtggctcaccgaggcagagcagttcctacgcaagacccagatccctgaaaattgggagcacgccaaatacaagtggtacttgaaagagctgcaagacggaataggccagcgtcagactgtagtccgtacactcaacgctaccggggaggagatcattcagcagagctccaaaaccgatgcttccattctgcaggaaaaactagggtcactgaatttaaggtggcaggaagtgtgtaagcagctcagcgatcgaaagaaaaggctcgaggagaccctggaaagacttcaggaactccaggaggccaccgacgaactggacctgaaacttagacaagctgaagtgattaaggggtcgtggcagccggtcggcgacctgctgattgattctctgcaggatcacctcgagaaggtcaaagccctgaggggggagattgcccccctgaaggagaacgtgtcccacgttaatgacctggctaggcagctgaccacactcgggattcagctcagtccttacaacctgtctaccctagaagacctgaacacacggtggaaattactgcaggtagccgtggaagacagggtaagacagctccacgaggcccaccgagacttcggcccagcctctcagcacttcctctctacttcagtgcaaggaccttgggagagggccatctcaccgaacaaagtgccttattatattaatcatgaaacccagaccacctgctgggatcatcctaaaatgaccgaactgtatcagagcctcgcagaccttaataacgtccggttttctgcctatcgtacagccatgaagctgaggaggctgcaaaaagcactctgtctcgacctcctgtcgctgagcgccgcttgcgacgcactcgaccagcacaacctcaagcagaacgatcagcccatggacatacttcaaattattaattgcctgactactatatatgatcgactcgaacaggaacataataacctagtgaacgttcccctgtgcgtggatatgtgtcttaactggctgctgaatgtgtacgacaccgggaggacaggaaggatccgagtgcttagcttcaagacaggtatcatttctctctgcaaggcacatctggaggacaagtatcgctatctattcaaacaggttgcaagctccacagggttttgtgatcaaaggaggcttggcctgttactccatgactctattcagatccctcgacagttaggcgaggtggccagcttcggggggtcaaacatcgaaccctcggtaaggtcctgcttccagtttgccaataataaacctgagattgaagctgcactgttcttggattggatgagactggaaccccagtcaatggtatggctcccggtgcttcatagagtggccgccgcggagacggcaaagcatcaagccaagtgcaatatctgcaaagaatgtcctatcattggatttagatatcgatccctaaagcattttaattacgacatctgtcagtcctgtttttttagtggcagggtggccaagggccataagatgcattaccctatggtggagtactgtacacctacaacttctggtgaagatgtaagggactttgctaaagtcctcaagaacaaattccgcactaagaggtacttcgccaagcacccaagaatggggtatctgcccgttcagactgtgctggagggtgataacatggaaactgacacgatg

SEQ ID NO: 251417 - DNA, 3432 bp, synthetic construct
  misc_feature 1..3432: note = Description of Artificial Sequence: Synthetic coding sequence
  source 1..3432: mol_type = other DNA
atgttatggtgggaagaggttgaagattgttatgaaagagaagatgttcaaaaaaagacttttacaaagtgggttaatgctcaattttctaagtttggaaaacaacatattgaaaatttattttcagatttacaagatggaagaagattgttagacttattagaaggattaacaggtcaaaaactcccaaaagagaagggaagtacacgtgtacatgcacttaataatgttaataaagctttgagagttttacaaaataataatgttgatcttgtcaatattggtagtactgatattgtagatggtaatcataagcttacattaggtcttatttggaatattattttgcattggcaagttaagaatgtaatgaaaaacatcatggcaggattacaacaaactaacagtgaaaaaatccttctctcatgggttagacaatctacccgtaattatccacaagttaatgttattaatttcacaactagttggtctgacggattagcactcaatgctttaatccattcacataggccagatttatttgactggaattcagttgtatgtcaacaaagtgctactcaaagattggaacatgcttttaatatagcaagataccaacttggaattgaaaaactattagatccagaagatgttgatacaacttatcctgataaaaaatctatacttatgtatattacgagcttatttcaagttcttccacaacaggtttctattgaagctatacaagaagttgaaatgttacctagaccacctaaagttacaaaagaagagcattttcaattacatcatcaaatgcattattcacaacaaattacagtatctttagctcaaggatatgaaagaacaagttctccaaagccaagatttaaatcatatgcatatacccaagctgcttatgttacaacatctgatccaactagatctccatttccatcacaacatttagaggctccagaagataaaagttttggaagtagtttaatggaaagtgaagttaaccttgatagatatcaaacagctttggaagaagttttatcatggttattatcagctgaagatactcttcaagcacaaggtgaaatttctaatgacgttgaagttgtaaaagatcaatttcatacacatgaaggatatatgatggatttaacagcccatcaaggaagagttggtaacattcttcaattaggatcaaaacttattgggactggaaaactttcagaagatgaagaaacagaggtgcaagagcaaatgaacttacttaactcaagatgggaatgtcttagagtagcttcaatggaaaagcaaagtaatttacatagagaaataagttatgtgccatcaacgtatttaacagaaatcacacatgttagtcaagcattattagaagttgaacaacttcttaatgctccagatttatgcgctaaagatttcgaagatttattcaaacaagaggaatctcttaaaaatataaaagattctcttcagcaatcaagtggtagaatcgatattattcattcaaaaaaaaccgctgcactacaatcagcaaccccagtggaaagagtgaaattacaagaagctttaagtcaattagattttcaatgggaaaaagttaataagatgtataaggatagacaagggagatttgacagaagcgttgaaaaatggagaagatttcattacgatattaaaattttcaatcaatggttaactgaagctgaacaatttcttagaaaaacacaaataccagagaattgggaacatgctaaatataaatggtatttaaaagaacttcaagatggaattggtcaaagacaaactgttgttagaactcttaatgctacaggagaagaaattatccaacaatcttcaaaaactgatgcatcaattcttcaagagaaattaggttcattaaatttaagatggcaagaagtatgcaaacaactaagtgatagaaaaaaaagattagaagaaacattagaaagattacaagaacttcaagaggcaacagatgagttagatttaaagttgcgacaagctgaagttattaaagggtcttggcaacctgttggagatttattaatagatagtttacaagatcatcttgagaaagtaaaagctcttagaggagagattgctccattaaaggagaatgtttctcatgtaaatgatcttgcaagacaacttacaactttaggaattcaattaagtccatacaatttaagtactcttgaagaccttaatactagatggaaactattacaagttgctgtagaagatagagttcgtcaattacatgaagctcatcgagattttggtcctgcatcacaacatttcttaagtacttctgttcaaggtccatgggaaagagcaatatctcctaataaagtaccatactatattaatcatgaaacacaaactacttgttgggatcatccaaaaatgactgaattatatcaatctttagcagatttaaataatgtaagattttcagcatatagaactgctatgaaattaagacgtttacaaaaagctctttgtttagatcttttatcactttcagctgcttgtgatgctttagatcaacacaatttaaaacaaaatgatcaaccaatggacatattacaaatcattaattgtcttactaccatttatgatagattagaacaagaacataacaatttagttaatgtaccattatgtgtcgatatgtgtcttaattggttattaaatgtctatgatacaggtagaactggacgaattagagttttatcttttaagactggaattattagtttatgtaaggctcatttagaagataaatatagatatcttttcaaacaagtagcaagttcaactggtttttgtgatcaacgaagattaggactccttcttcatgactcaatccaaataccaagacagttgggagaagtagctagtttcggtggatcaaatattgaaccatcagtacgaagttgttttcaatttgcaaataacaaacctgaaatagaagctgcattattccttgattggatgagattagaaccacaatctatggtatggttaccagttttacatagagttgctgcagcagaaacagcaaaacatcaagctaagtgtaatatttgtaaagaatgcccaataattgggttcagatatcgttcattaaaacattttaattatgatatttgccaaagttgttttttttcagggagagttgcaaagggacataaaatgcattatccaatggttgaatattgtacaccaactacttctggagaagatgtaagagacttcgcaaaagttttaaaaaataaatttagaacaaaacgttattttgcaaaacatccaagaatgggatatcttccagttcaaactgttttagaaggtgataatatggaaacagatacaatg

SEQ ID NO: 251418 - DNA, 3432 bp, synthetic construct
  misc_feature 1..3432: note = Description of Artificial Sequence: Synthetic coding sequence
  source 1..3432: mol_type = other DNA
atgctgtggtgggaagaggtcgaggactgctacgaacgcgaagatgtccaaaagaaaaccttcaccaagtgggtcaacgcccaattttcgaaatttggaaagcaacatatcgagaatctcttcagcgaccttcaagacggacgacgccttctggacctgctcgaaggtcttaccggacagaagctccctaaggagaagggatccaccagagtccatgcccttaacaatgtgaataaagccctgagggtcctgcagaataacaacgtcgacctggtgaacatcggttccaccgatattgtcgatggtaaccacaaacttacgctgggtcttatttggaacatcattcttcactggcaggtgaagaacgtgatgaagaacattatggcaggcctgcaacagaccaactcagagaaaattcttcttagctgggtgcggcagtccacccgcaactacccgcaagtcaatgtgattaactttactacctcgtggtccgacggactggccttgaatgcactcatacactcccaccgccctgatctctttgattggaattcagtggtctgtcagcaaagcgctacgcaaaggctggagcatgcattcaatatagcgagataccagcttggaattgaaaagttgcttgatcctgaagatgtggacaccacttaccctgataagaagtcaatcctgatgtacattacttccctgttccaggtgctgcctcagcaagtgagcatcgaagcaattcaagaagtggagatgttgcctaggcctccaaaggtgacgaaggaagaacattttcaactgcatcatcaaatgcattactcccaacaaattaccgtctcattggcacaagggtatgagaggacctcgtcgcccaaacctcgttttaagagctacgcgtatacccaggcagcctacgtgactacttcagacccaactaggagcccttttccctctcaacatctcgaggcacctgaagataagtcgttcggtagctcactcatggaatcggaagtgaatttggaccgctaccaaactgcacttgaagaggtgctgtcctggcttctgtcagcagaagatactcttcaagcacagggggaaataagcaacgacgtcgaagtcgtgaaagaccagtttcatacccatgaaggttacatgatggatctgactgcccatcaaggacgggtgggtaatatcctgcagctgggatcgaaacttatcgggaccggcaaactttcagaagatgaagaaaccgaagtccaagagcagatgaatctgctgaactcacggtgggaatgtctgcgtgtggcctcgatggagaaacaatctaaccttcatagagagatatcatacgtgccttcgacttacttgactgagatcactcatgtgtcgcaagcacttttggaggttgagcaacttctgaatgcacctgatctttgtgcgaaggattttgaagatctgttcaagcaggaagaatcgctgaaaaacattaaagactccctgcagcaaagctcgggtagaattgacattatccactcaaaaaagaccgcagcactccagtcggcaaccccagtggaaagagtcaagctccaagaggcgcttagccaactggactttcagtgggaaaaggtgaataagatgtacaaggaccggcagggaagatttgatcgcagcgtggagaaatggcgacggtttcattacgacataaagattttcaaccagtggctcactgaagccgaacagtttctgcgaaagacgcagattcctgagaattgggagcacgctaagtacaagtggtatttgaaggaactgcaggacggtatcggacagcgtcaaactgtggtgcgtactttgaacgcaactggcgaagaaatcatacaacaatccagtaagaccgatgcatccattctccaagaaaagctggggtccctgaatctgcgctggcaagaagtgtgtaaacagctcagcgaccgaaagaaaagactcgaagagacgttggagcggctccaagaactgcaagaggcaaccgatgagcttgatctgaaattgagacaagccgaggtgatcaaaggttcctggcagcccgtgggcgaccttctcattgactcccttcaagaccacttggagaaagtgaaggcacttaggggcgagatcgcacctcttaaagaaaacgtgtcccatgtcaatgacctggctcgccagctcacgactctgggaatccaacttagcccttacaacctgtcgactcttgaggacctcaataccagatggaagttgcttcaagtggcagtggaagatcgcgtccgacagcttcacgaagcacacagagattttggacctgcctcgcagcactttctctcgacttccgtgcagggtccatgggagagggcaatttcccccaacaaggtgccatattacatcaaccatgaaacccaaactacgtgctgggaccatcctaagatgacggagctgtaccaaagcctggctgacctcaacaatgtgaggttcagcgcctacagaacggcaatgaagctgcgccggctccagaaggctctctgtcttgatctcctgtcactgtccgccgcatgtgacgcacttgaccagcacaatctgaaacagaacgaccagccgatggacattcttcagattatcaattgcctcaccaccatctatgacagattggaacaggagcataacaacctggttaatgtgcccttgtgtgtggatatgtgccttaattggcttcttaatgtctacgatacggggagaactggacgtatcagggtgcttagctttaagacgggaattatctctctttgtaaggcccatcttgaggacaagtatcggtacctctttaaacaggtggcatcctcgactggattttgtgatcagcgtagacttggacttctgctccacgattccattcagattcctagacagctgggggaggtggcctccttcggcggtagcaacatcgaaccatccgtcagaagctgttttcaattcgcgaacaataagcccgaaattgaagccgcgctttttcttgattggatgcgacttgaacctcaatcgatggtctggctgccagttctgcatcgagtggcggcagcagagacggccaaacatcaagcaaaatgtaacatctgcaaggaatgtcccattatcggttttagataccggagcctcaagcactttaactatgatatttgtcaaagctgtttcttttccggtcgagttgcaaaaggacataagatgcattacccgatggtggaatactgcacccctaccactagcggtgaggatgtcagagatttcgcaaaggtgctgaagaataagttccgcactaaaagatactttgcgaaacatccccggatgggataccttcctgtgcagactgtgctggagggcgacaatatggagactgatactatg

SEQ ID NO: 251419-251422 - skipped (4 entries)

SEQ ID NO: 251423 - protein, 6 aa, Homo sapiens
LVPRGS

SEQ ID NO: 251424 - protein, 4 aa, Homo sapiens
LVPR

SEQ ID NO: 251425 - skipped

SEQ ID NO: 251426 - protein, 4 aa, Homo sapiens
IEGR

SEQ ID NO: 251427 - protein, 4 aa, Homo sapiens
IDGR

SEQ ID NO: 251428 - protein, 4 aa, Homo sapiens
AEGR

SEQ ID NO: 251429 - skipped

SEQ ID NO: 251430 - DNA, 615 bp, Homo sapiens
  source 1..615: mol_type = unassigned DNA
atggctggacctgccacccagagccccatgaagctgatggccctgcagctgctgctgtggcacagtgcactctggacagtgcaggaagccacccccctgggccctgccagctccctgccccagagcttcctgctcaagtgcttagagcaagtgaggaagatccagggcgatggcgcagcgctccaggagaagctgtgtgccacctacaagctgtgccaccccgaggagctggtgctgctcggacactctctgggcatcccctgggctcccctgagcagctgccccagccaggccctgcagctggcaggctgcttgagccaactccatagcggccttttcctctaccaggggctcctgcaggccctggaagggatctcccccgagttgggtcccaccttggacacactgcagctggacgtcgccgactttgccaccaccatctggcagcagatggaagaactgggaatggcccctgccctgcagcccacccagggtgccatgccggccttcgcctctgctttccagcgccgggcaggaggggtcctggttgcctcccatctgcagagcttcctggaggtgtcgtaccgcgttctacgccaccttgcccagccctga

SEQ ID NO: 251431 - DNA, 800 bp, synthetic construct
  misc_feature 1..800: note = Description of Artificial Sequence: Synthetic transcript sequence
  source 1..800: mol_type = other DNA
taatacgactcactatagggaaataagagagaaaagaagagtaagaagaaatataagagccaccatggctggacctgccacccagagccccatgaagctgatggccctgcagctgctgctgtggcacagtgcactctggacagtgcaggaagccacccccctgggccctgccagctccctgccccagagcttcctgctcaagtgcttagagcaagtgaggaagatccagggcgatggcgcagcgctccaggagaagctgtgtgccacctacaagctgtgccaccccgaggagctggtgctgctcggacactctctgggcatcccctgggctcccctgagcagctgccccagccaggccctgcagctggcaggctgcttgagccaactccatagcggccttttcctctaccaggggctcctgcaggccctggaagggatctcccccgagttgggtcccaccttggacacactgcagctggacgtcgccgactttgccaccaccatctggcagcagatggaagaactgggaatggcccctgccctgcagcccacccagggtgccatgccggccttcgcctctgctttccagcgccgggcaggaggggtcctggttgcctcccatctgcagagcttcctggaggtgtcgtaccgcgttctacgccaccttgcccagccctgaagcgctgccttctgcggggcttgccttctggccatgcccttcttctctcccttgcacctgtacctcttggtctttgaataaagcctgagtaggaaggcggccgctcgagcatgcatctaga

SEQ ID NO: 251432 - DNA, 800 bp, synthetic construct
  misc_feature 1..800: note = Description of Artificial Sequence: Synthetic transcript sequence
  source 1..800: mol_type = other DNA
taatacgactcactatagggaaataagagagaaaagaagagtaagaagaaatataagagccaccatggccggtcccgcgacccaaagccccatgaaacttatggccctgcagttgctgctttggcactcggccctctggacagtccaagaagcgactcctctcggacctgcctcatcgttgccgcagtcattccttttgaagtgtctggagcaggtgcgaaagattcagggcgatggagccgcactccaagagaagctctgcgcgacatacaaactttgccatcccgaggagctcgtactgctcgggcacagcttggggattccctgggctcctctctcgtcctgtccgtcgcaggctttgcagttggcagggtgcctttcccagctccactccggtttgttcttgtatcagggactgctgcaagcccttgagggaatctcgccagaattgggcccgacgctggacacgttgcagctcgacgtggcggatttcgcaacaaccatctggcagcagatggaggaactggggatggcacccgcgctgcagcccacgcagggggcaatgccggcctttgcgtccgcgtttcagcgcagggcgggtggagtcctcgtagcgagccaccttcaatcatttttggaagtctcgtaccgggtgctgagacatcttgcgcagccgtgaagcgctgccttctgcggggcttgccttctggccatgcccttcttctctcccttgcacctgtacctcttggtctttgaataaagcctgagtaggaaggcggccgctcgagcatgcatctaga

SEQ ID NO: 251433 - RNA, 758 nt, synthetic construct
  misc_feature 1..758: note = Description of Artificial Sequence: Synthetic transcript sequence
  source 1..758: mol_type = other RNA
gggaaataagagagaaaagaagagtaagaagaaatataagagccaccatggccggtcccgcgacccaaagccccatgaaacttatggccctgcagttgctgctttggcactcggccctctggacagtccaagaagcgactcctctcggacctgcctcatcgttgccgcagtcattccttttgaagtgtctggagcaggtgcgaaagattcagggcgatggagccgcactccaagagaagctctgcgcgacatacaaactttgccatcccgaggagctcgtactgctcgggcacagcttggggattccctgggctcctctctcgtcctgtccgtcgcaggctttgcagttggcagggtgcctttcccagctccactccggtttgttcttgtatcagggactgctgcaagcccttgagggaatctcgccagaattgggcccgacgctggacacgttgcagctcgacgtggcggatttcgcaacaaccatctggcagcagatggaggaactggggatggcacccgcgctgcagcccacgcagggggcaatgccggcctttgcgtccgcgtttcagcgcagggcgggtggagtcctcgtagcgagccaccttcaatcatttttggaagtctcgtaccgggtgctgagacatcttgcgcagccgtgaagcgctgccttctgcggggcttgccttctggccatgcccttcttctctcccttgcacctgtacctcttggtctttgaataaagcctgagtaggaag

SEQ ID NO: 251434 - RNA, 854 nt, synthetic construct
  misc_feature 1..854: note = Description of Artificial Sequence: Synthetic transcript sequence
  source 1..854: mol_type = other RNA
gggaaataagagagaaaagaagagtaagaagaaatataagagccaccatggtatccaagggggaggaggacaacatggcgatcatcaaggagttcatgcgattcaaggtgcacatggaaggttcggtcaacggacacgaatttgaaatcgaaggagagggtgaaggaaggccctatgaagggacacagaccgcgaaactcaaggtcacgaaagggggaccacttcctttcgcctgggacattctttcgccccagtttatgtacgggtccaaagcatatgtgaagcatcccgccgatattcctgactatctgaaactcagctttcccgagggattcaagtgggagcgggtcatgaactttgaggacgggggtgtagtcaccgtaacccaagactcaagcctccaagacggcgagttcatctacaaggtcaaactgcgggggactaactttccgtcggatgggccggtgatgcagaagaaaacgatgggatgggaagcgtcatcggagaggatgtacccagaagatggtgcattgaagggggagatcaagcagagactgaagttgaaagatgggggacattatgatgccgaggtgaaaacgacatacaaagcgaaaaagccggtgcagcttcccggagcgtataatgtgaatatcaagttggatattacttcacacaatgaggactacacaattgtcgaacagtacgaacgcgctgagggtagacactcgacgggaggcatggacgagttgtacaaatgataagctgccttctgcggggcttgccttctggccatgcccttcttctctcccttgcacctgtacctcttggtctttgaataaagcctgagtaggaag

SEQ ID NO: 251435 - DNA, 896 bp, synthetic construct
  misc_feature 1..896: note = Description of Artificial Sequence: Synthetic transcript sequence
  source 1..896: mol_type = other DNA
taatacgactcactatagggaaataagagagaaaagaagagtaagaagaaatataagagccaccatggtatccaagggggaggaggacaacatggcgatcatcaaggagttcatgcgattcaaggtgcacatggaaggttcggtcaacggacacgaatttgaaatcgaaggagagggtgaaggaaggccctatgaagggacacagaccgcgaaactcaaggtcacgaaagggggaccacttcctttcgcctgggacattctttcgccccagtttatgtacgggtccaaagcatatgtgaagcatcccgccgatattcctgactatctgaaactcagctttcccgagggattcaagtgggagcgggtcatgaactttgaggacgggggtgtagtcaccgtaacccaagactcaagcctccaagacggcgagttcatctacaaggtcaaactgcgggggactaactttccgtcggatgggccggtgatgcagaagaaaacgatgggatgggaagcgtcatcggagaggatgtacccagaagatggtgcattgaagggggagatcaagcagagactgaagttgaaagatgggggacattatgatgccgaggtgaaaacgacatacaaagcgaaaaagccggtgcagcttcccggagcgtataatgtgaatatcaagttggatattacttcacacaatgaggactacacaattgtcgaacagtacgaacgcgctgagggtagacactcgacgggaggcatggacgagttgtacaaatgataagctgccttctgcggggcttgccttctggccatgcccttcttctctcccttgcacctgtacctcttggtctttgaataaagcctgagtaggaaggcggccgctcgagcatgcatctaga

SEQ ID NO: 251436 - RNA, 725 nt, synthetic construct
  misc_feature 1..725: note = Description of Artificial Sequence: Synthetic transcript sequence
  source 1..725: mol_type = other RNA
gggaaataagagagaaaagaagagtaagaagaaatataagagccaccatgggagtgcacgagtgtcccgcgtggttgtggttgctgctgtcgctcttgagcctcccactgggactgcctgtgctgggggcaccacccagattgatctgcgactcacgggtacttgagaggtaccttcttgaagccaaagaagccgaaaacatcacaaccggatgcgccgagcactgctccctcaatgagaacattactgtaccggatacaaaggtcaatttctatgcatggaagagaatggaagtaggacagcaggccgtcgaagtgtggcaggggctcgcgcttttgtcggaggcggtgttgcggggtcaggccctcctcgtcaactcatcacagccgtgggagcccctccaacttcatgtcgataaagcggtgtcggggctccgcagcttgacgacgttgcttcgggctctgggcgcacaaaaggaggctatttcgccgcctgacgcggcctccgcggcacccctccgaacgatcaccgcggacacgtttaggaagctttttagagtgtacagcaatttcctccgcggaaagctgaaattgtatactggtgaagcgtgtaggacaggggatcgctgataagctgccttctgcggggcttgccttctggccatgcccttcttctctcccttgcacctgtacctcttggtctttgaataaagcctgagtaggaag

SEQ ID NO: 251437 - RNA, 1536 nt, synthetic construct
  misc_feature 1..1536: note = Description of Artificial Sequence: Synthetic transcript sequence
  source 1..1536: mol_type = other RNA
gggaaataagagagaaaagaagagtaagaagaaatataagagccaccaatgcagcgcgtcaacatgattatggccgaatcgccgggactcatcacaatctgcctcttgggttatctcttgtcggcagaatgtaccgtgttcttggatcacgaaaacgcgaacaaaattcttaatcgcccgaagcggtataactccgggaaacttgaggagtttgtgcagggcaatcttgaacgagagtgcatggaggagaaatgctcctttgaggaggcgagggaagtgtttgaaaacacagagcgaacaacggagttttggaagcaatacgtagatggggaccagtgtgagtcgaatccgtgcctcaatgggggatcatgtaaagatgacatcaatagctatgaatgctggtgcccgtttgggtttgaagggaagaactgtgagctggatgtgacgtgcaacatcaaaaacggacgctgtgagcagttttgtaagaactcggctgacaataaggtagtatgctcgtgcacagagggataccggctggcggagaaccaaaaatcgtgcgagcccgcagtcccgttcccttgtgggagggtgagcgtgtcacagactagcaagttgacgagagcggagactgtattccccgacgtggactacgtcaacagcaccgaagccgaaacaatcctcgataacatcacgcagagcactcagtccttcaatgactttacgagggtcgtaggtggtgaggacgcgaaacccggtcagttcccctggcaggtggtattgaacggaaaagtcgatgccttttgtggaggttccattgtcaacgagaagtggattgtcacagcggcacactgcgtagaaacaggagtgaaaatcacggtagtggcgggagagcataacattgaagagacagagcacacggaacaaaagcgaaatgtcatcagaatcattccacaccataactataacgcggcaatcaataagtacaatcacgacatcgcacttttggagcttgacgaacctttggtgcttaattcgtacgtcacccctatttgtattgccgacaaagagtatacaaacatcttcttgaaattcggctccgggtacgtatcgggctggggcagagtgttccataagggtagatccgcactggtgttgcaatacctcagggtgcccctcgtggatcgagccacttgtctgcggtccaccaaattcacaatctacaacaatatgttctgtgcgggattccatgaaggtgggagagatagctgccagggagactcagggggtccccacgtgacggaagtcgaggggacgtcatttctgacgggaattatctcatggggagaggaatgtgcgatgaaggggaaatatggcatctacactaaagtgtcacggtatgtcaattggatcaaggaaaagacgaaactcacgtgatcagccagcgctgccttctgcggggcttgccttctggccatgcccttcttctctcccttgcacctgtacctcttggtctttgaataaagcctgagtaggaag

SEQ ID NO: 251438 - DNA, 767 bp, synthetic construct
  misc_feature 1..767: note = Description of Artificial Sequence: Synthetic transcript sequence
  source 1..767: mol_type = other DNA
taatacgactcactatagggaaataagagagaaaagaagagtaagaagaaatataagagccaccatgggagtgcacgagtgtcccgcgtggttgtggttgctgctgtcgctcttgagcctcccactgggactgcctgtgctgggggcaccacccagattgatctgcgactcacgggtacttgagaggtaccttcttgaagccaaagaagccgaaaacatcacaaccggatgcgccgagcactgctccctcaatgagaacattactgtaccggatacaaaggtcaatttctatgcatggaagagaatggaagtaggacagcaggccgtcgaagtgtggcaggggctcgcgcttttgtcggaggcggtgttgcggggtcaggccctcctcgtcaactcatcacagccgtgggagcccctccaacttcatgtcgataaagcggtgtcggggctccgcagcttgacgacgttgcttcgggctctgggcgcacaaaaggaggctatttcgccgcctgacgcggcctccgcggcacccctccgaacgatcaccgcggacacgtttaggaagctttttagagtgtacagcaatttcctccgcggaaagctgaaattgtatactggtgaagcgtgtaggacaggggatcgctgataagctgccttctgcggggcttgccttctggccatgcccttcttctctcccttgcacctgtacctcttggtctttgaataaagcctgagtaggaaggcggccgctcgagcatgcatctaga

SEQ ID NO: 251439 - DNA, 750 bp, synthetic construct
  misc_feature 1..750: note = Description of Artificial Sequence: Synthetic transcript sequence
  source 1..750: mol_type = other DNA
taatacgactcactatagggaaataagagagaaaagaagagtaagaagaaatataagagccaccatgggagtgcacgagtgtcccgcgtggttgtggttgctgctgtcgctcttgagcctcccactgggactgcctgtgctgggggcaccacccagattgatctgcgactcacgggtacttgagaggtaccttcttgaagccaaagaagccgaaaacatcacaaccggatgcgccgagcactgctccctcaatgagaacattactgtaccggatacaaaggtcaatttctatgcatggaagagaatggaagtaggacagcaggccgtcgaagtgtggcaggggctcgcgcttttgtcggaggcggtgttgcggggtcaggccctcctcgtcaactcatcacagccgtgggagcccctccaacttcatgtcgataaagcggtgtcggggctccgcagcttgacgacgttgcttcgggctctgggcgcacaaaaggaggctatttcgccgcctgacgcggcctccgcggcacccctccgaacgatcaccgcggacacgtttaggaagctttttagagtgtacagcaatttcctccgcggaaagctgaaattgtatactggtgaagcgtgtaggacaggggatcgctgataagctgccttctgcggggcttgccttctggccatgcccttcttctctcccttgcacctgtacctcttggtctttgaataaagcctgagtaggaaggcggccgc

SEQ ID NO: 251440 - DNA, 1578 bp, synthetic construct
  misc_feature 1..1578: note = Description of Artificial Sequence: Synthetic transcript sequence
  source 1..1578: mol_type = other DNA
taatacgactcactatagggaaataagagagaaaagaagagtaagaagaaatataagagccaccaatgcagcgcgtcaacatgattatggccgaatcgccgggactcatcacaatctgcctcttgggttatctcttgtcggcagaatgtaccgtgttcttggatcacgaaaacgcgaacaaaattcttaatcgcccgaagcggtataactccgggaaacttgaggagtttgtgcagggcaatcttgaacgagagtgcatggaggagaaatgctcctttgaggaggcgagggaagtgtttgaaaacacagagcgaacaacggagttttggaagcaatacgtagatggggaccagtgtgagtcgaatccgtgcctcaatgggggatcatgtaaagatgacatcaatagctatgaatgctggtgcccgtttgggtttgaagggaagaactgtgagctggatgtgacgtgcaacatcaaaaacggacgctgtgagcagttttgtaagaactcggctgacaataaggtagtatgctcgtgcacagagggataccggctggcggagaaccaaaaatcgtgcgagcccgcagtcccgttcccttgtgggagggtgagcgtgtcacagactagcaagttgacgagagcggagactgtattccccgacgtggactacgtcaacagcaccgaagccgaaacaatcctcgataacatcacgcagagcactcagtccttcaatgactttacgagggtcgtaggtggtgaggacgcgaaacccggtcagttcccctggcaggtggtattgaacggaaaagtcgatgccttttgtggaggttccattgtcaacgagaagtggattgtcacagcggcacactgcgtagaaacaggagtgaaaatcacggtagtggcgggagagcataacattgaagagacagagcacacggaacaaaagcgaaatgtcatcagaatcattccacaccataactataacgcggcaatcaataagtacaatcacgacatcgcacttttggagcttgacgaacctttggtgcttaattcgtacgtcacccctatttgtattgccgacaaagagtatacaaacatcttcttgaaattcggctccgggtacgtatcgggctggggcagagtgttccataagggtagatccgcactggtgttgcaatacctcagggtgcccctcgtggatcgagccacttgtctgcggtccaccaaattcacaatctacaacaatatgttctgtgcgggattccatgaaggtgggagagatagctgccagggagactcagggggtccccacgtgacggaagtcgaggggacgtcatttctgacgggaattatctcatggggagaggaatgtgcgatgaaggggaaatatggcatctacactaaagtgtcacggtatgtcaattggatcaaggaaaagacgaaactcacgtgatcagccagcgctgccttctgcggggcttgccttctggccatgcccttcttctctcccttgcacctgtacctcttggtctttgaataaagcctgagtaggaaggcggccgctcgagcatgcatctaga

SEQ ID NO: 251441 - RNA, 851 nt, synthetic construct
  misc_feature 1..851: note = Description of Artificial Sequence: Synthetic transcript sequence
  source 1..851: mol_type = other RNA
gggaaataagagagaaaagaagagtaagaagaaatataagagccaccatggtgagcaagggcgaggaggataacatggccatcatcaaggagttcatgcgcttcaaggtgcacatggagggctccgtgaacggccacgagttcgagatcgagggcgagggcgagggccgcccctacgagggcacccagaccgccaagctgaaggtgaccaagggtggccccctgcccttcgcctgggacatcctgtcccctcagttcatgtacggctccaaggcctacgtgaagcaccccgccgacatccccgactacttgaagctgtccttccccgagggcttcaagtgggagcgcgtgatgaacttcgaggacggcggcgtggtgaccgtgacccaggactcctccctgcaggacggcgagttcatctacaaggtgaagctgcgcggcaccaacttcccctccgacggccccgtaatgcagaagaagaccatgggctgggaggcctcctccgagcggatgtaccccgaggacggcgccctgaagggcgagatcaagcagaggctgaagctgaaggacggcggccactacgacgctgaggtcaagaccacctacaaggccaagaagcccgtgcagctgcccggcgcctacaacgtcaacatcaagttggacatcacctcccacaacgaggactacaccatcgtggaacagtacgaacgcgccgagggccgccactccaccggcggcatggacgagctgtacaagtgagctgccttctgcggggcttgccttctggccatgcccttcttctctcccttgcacctgtacctcttggtctttgaataaagcctgagtaggaag

SEQ ID NO: 251442 - DNA, 1838 bp, synthetic construct
  misc_feature 1..1838: note = Description of Artificial Sequence: Synthetic transcript sequence
  source 1..1838: mol_type = other DNA
taatacgactcactatagggaaataagagagaaaagaagagtaagaagaaatataagagccaccatggaagatgcgaagaacatcaagaagggacctgccccgttttaccctttggaggacggtacagcaggagaacagctccacaaggcgatgaaacgctacgccctggtccccggaacgattgcgtttaccgatgcacatattgaggtagacatcacatacgcagaatacttcgaaatgtcggtgaggctggcggaagcgatgaagagatatggtcttaacactaatcaccgcatcgtggtgtgttcggagaactcattgcagtttttcatgccggtccttggagcacttttcatcggggtcgcagtcgcgccagcgaacgacatctacaatgagcgggaactcttgaatagcatgggaatctcccagccgacggtcgtgtttgtctccaaaaaggggctgcagaaaatcctcaacgtgcagaagaagctccccattattcaaaagatcatcattatggatagcaagacagattaccaagggttccagtcgatgtatacctttgtgacatcgcatttgccgccagggtttaacgagtatgacttcgtccccgagtcatttgacagagataaaaccatcgcgctgattatgaattcctcgggtagcaccggtttgccaaagggggtggcgttgccccaccgcactgcttgtgtgcggttctcgcacgctagggatcctatctttggtaatcagatcattcccgacacagcaatcctgtccgtggtaccttttcatcacggttttggcatgttcacgactctcggctatttgatttgcggtttcagggtcgtacttatgtatcggttcgaggaagaactgtttttgagatccttgcaagattacaagatccagtcggccctccttgtgccaacgcttttctcattctttgcgaaatcgacacttattgataagtatgacctttccaatctgcatgagattgcctcagggggagcgccgcttagcaaggaagtcggggaggcagtggccaagcgcttccaccttcccggaattcggcagggatacgggctcacggagacaacatccgcgatccttatcacgcccgagggtgacgataagccgggagccgtcggaaaagtggtccccttctttgaagccaaggtcgtagacctcgacacgggaaaaaccctcggagtgaaccagaggggcgagctctgcgtgagagggccgatgatcatgtcaggttacgtgaataaccctgaagcgacgaatgcgctgatcgacaaggatgggtggttgcattcgggagacattgcctattgggatgaggatgagcacttctttatcgtagatcgacttaagagcttgatcaaatacaaaggctatcaggtagcgcctgccgagctcgagtcaatcctgctccagcaccccaacattttcgacgccggagtggccgggttgcccgatgacgacgcgggtgagctgccagcggccgtggtagtcctcgaacatgggaaaacaatgaccgaaaaggagatcgtggactacgtagcatcacaagtgacgactgcgaagaaactgaggggaggggtagtctttgtggacgaggtcccgaaaggcttgactgggaagcttgacgctcgcaaaatccgggaaatcctgattaaggcaaagaaaggcgggaaaatcgctgtctgataagctgccttctgcggggcttgccttctggccatgcccttcttctctcccttgcacctgtacctcttggtctttgaataaagcctgagtaggaaggcggccgctcgagcatgcatctaga

SEQ ID NO: 251443 - RNA, 1796 nt, synthetic construct
  misc_feature 1..1796: note = Description of Artificial Sequence: Synthetic transcript sequence
  source 1..1796: mol_type = other RNA
gggaaataagagagaaaagaagagtaagaagaaatataagagccaccatggaagatgcgaagaacatcaagaagggacctgccccgttttaccctttggaggacggtacagcaggagaacagctccacaaggcgatgaaacgctacgccctggtccccggaacgattgcgtttaccgatgcacatattgaggtagacatcacatacgcagaatacttcgaaatgtcggtgaggctggcggaagcgatgaagagatatggtcttaacactaatcaccgcatcgtggtgtgttcggagaactcattgcagtttttcatgccggtccttggagcacttttcatcggggtcgcagtcgcgccagcgaacgacatctacaatgagcgggaactcttgaatagcatgggaatctcccagccgacggtcgtgtttgtctccaaaaaggggctgcagaaaatcctcaacgtgcagaagaagctccccattattcaaaagatcatcattatggatagcaagacagattaccaagggttccagtcgatgtatacctttgtgacatcgcatttgccgccagggtttaacgagtatgacttcgtccccgagtcatttgacagagataaaaccatcgcgctgattatgaattcctcgggtagcaccggtttgccaaagggggtggcgttgccccaccgcactgcttgtgtgcggttctcgcacgctagggatcctatctttggtaatcagatcattcccgacacagcaatcctgtccgtggtaccttttcatcacggttttggcatgttcacgactctcggctatttgatttgcggtttcagggtcgtacttatgtatcggttcgaggaagaactgtttttgagatccttgcaagattacaagatccagtcggccctccttgtgccaacgcttttctcattctttgcgaaatcgacacttattgataagtatgacctttccaatctgcatgagattgcctcagggggagcgccgcttagcaaggaagtcggggaggcagtggccaagcgcttccaccttcccggaattcggcagggatacgggctcacggagacaacatccgcgatccttatcacgcccgagggtgacgataagccgggagccgtcggaaaagtggtccccttctttgaagccaaggtcgtagacctcgacacgggaaaaaccctcggagtgaaccagaggggcgagctctgcgtgagagggccgatgatcatgtcaggttacgtgaataaccctgaagcgacgaatgcgctgatcgacaaggatgggtggttgcattcgggagacattgcctattgggatgaggatgagcacttctttatcgtagatcgacttaagagcttgatcaaatacaaaggctatcaggtagcgcctgccgagctcgagtcaatcctgctccagcaccccaacattttcgacgccggagtggccgggttgcccgatgacgacgcgggtgagctgccagcggccgtggtagtcctcgaacatgggaaaacaatgaccgaaaaggagatcgtggactacgtagcatcacaagtgacgactgcgaagaaactgaggggaggggtagtctttgtggacgaggtcccgaaaggcttgactgggaagcttgacgctcgcaaaatccgggaaatcctgattaaggcaaagaaaggcgggaaaatcgctgtctgataagctgccttctgcggggcttgccttctggccatgcccttcttctctcccttgcacctgtacctcttggtctttgaataaagcctgagtaggaag

SEQ ID NO: 251444 - DNA, 905 bp, synthetic construct
  misc_feature 1..905: note = Description of Artificial Sequence: Synthetic transcript sequence
  source 1..905: mol_type = other DNA
taatacgactcactatagggaaataagagagaaaagaagagtaagaagaaatataagagccaccatggtgtccaagggtgaggaattgtttaccggggtggtgcctattctcgtcgaacttgacggggatgtgaatggacacaagttttcggtatccggagaaggagagggtgacgccacatacggaaagcttacactcaaattcatctgtacgacggggaaactgcccgtaccctggcctacgctcgtaaccacgctgacttatggagtgcagtgctttagcagataccccgaccatatgaagcagcacgacttcttcaagtcggcgatgcccgaggggtacgtgcaagagaggaccattttcttcaaagacgatggcaattacaaaacacgcgcagaagtcaagtttgagggcgatactctggtcaatcggatcgaattgaagggaatcgatttcaaagaagatggaaacatccttggccataagctcgagtacaactataactcgcataatgtctatatcatggctgacaagcagaaaaacggtatcaaagtcaactttaagatccgacacaatattgaggacggttcggtgcagcttgcggaccactatcaacagaatacgccgattggggatggtccggtccttttgccggataaccattatctctcaacccagtcagccctgagcaaagatccaaacgagaagagggaccacatggtcttgctcgaattcgtgacagcggcagggatcactctgggaatggacgagttgtacaagtgataagctgccttctgcggggcttgccttctggccatgcccttcttctctcccttgcacctgtacctcttggtctttgaataaagcctgagtaggaaggcggccgctcgagcatgcatctaga

SEQ ID NO: 251445 - RNA, 863 nt, synthetic construct
  misc_feature 1..863: note = Description of Artificial Sequence: Synthetic transcript sequence
  source 1..863: mol_type = other RNA
gggaaataagagagaaaagaagagtaagaagaaatataagagccaccatggtgtccaagggtgaggaattgtttaccggggtggtgcctattctcgtcgaacttgacggggatgtgaatggacacaagttttcggtatccggagaaggagagggtgacgccacatacggaaagcttacactcaaattcatctgtacgacggggaaactgcccgtaccctggcctacgctcgtaaccacgctgacttatggagtgcagtgctttagcagataccccgaccatatgaagcagcacgacttcttcaagtcggcgatgcccgaggggtacgtgcaagagaggaccattttcttcaaagacgatggcaattacaaaacacgcgcagaagtcaagtttgagggcgatactctggtcaatcggatcgaattgaagggaatcgatttcaaagaagatggaaacatccttggccataagctcgagtacaactataactcgcataatgtctatatcatggctgacaagcagaaaaacggtatcaaagtcaactttaagatccgacacaatattgaggacggttcggtgcagcttgcggaccactatcaacagaatacgccgattggggatggtccggtccttttgccggataaccattatctctcaacccagtcagccctgagcaaagatccaaacgagaagagggaccacatggtcttgctcgaattcgtgacagcggcagggatcactctgggaatggacgagttgtacaagtgataagctgccttctgcggggcttgccttctggccatgcccttcttctctcccttgcacctgtacctcttggtctttgaataaagcctgagtaggaag

SEQ ID NO: 251446 - RNA, 716 nt, synthetic construct
  misc_feature 1..716: note = Description of Artificial Sequence: Synthetic transcript sequence
  source 1..716: mol_type = other RNA
gggaaataagagagaaaagaagagtaagaagaaatataagagccaccatgaactttctcttgtcatgggtgcactggagccttgcgctgctgctgtatcttcatcacgctaagtggagccaggccgcacccatggcggagggtggcggacagaatcaccacgaagtagtcaaattcatggacgtgtaccagaggtcgtattgccatccgattgaaactcttgtggatatctttcaagaataccccgatgaaatcgagtacattttcaaaccgtcgtgtgtccctctcatgaggtgcgggggatgctgcaatgatgaagggttggagtgtgtccccacggaggagtcgaatatcacaatgcaaatcatgcgcatcaaaccacatcagggtcagcatattggagagatgtcctttctccagcacaacaaatgtgagtgtagaccgaagaaggaccgagcccgacaggaaaacccatgcggaccgtgctccgagcggcgcaaacacttgttcgtacaagacccccagacatgcaagtgctcatgtaagaataccgattcgcggtgtaaggcgagacagctggaattgaacgagcgcacgtgtaggtgcgacaagcctagacggtgagctgccttctgcggggcttgccttctggccatgcccttcttctctcccttgcacctgtacctcttggtctttgaataaagcctgagtaggaag

SEQ ID NO: 251447 - RNA, 1316 nt, synthetic construct
  misc_feature 1..1316: note = Description of Artificial Sequence: Synthetic transcript sequence
  source 1..1316: mol_type = other RNA
gggaaataagagagaaaagaagagtaagaagaaatataagagccaccatgcccccatcgggattgagattgttgccccttctgcttccgctgctttggttgctcgtcctgacccctggcaggcccgcagcggggttgtcgacgtgtaagacgattgacatggagctcgtgaaacgcaagagaattgaagcaatcaggggtcaaattctgagcaaactcagactcgcatccccaccgtcccagggtgaggtcccaccgggacctctgcccgaggcggtcctggccttgtacaactcgacacgcgaccgagtcgcaggggagtcagcggaacccgagcccgaacccgaggccgactactacgccaaagaggtcactcgggtcttgatggtggaaactcacaacgaaatctacgacaagtttaagcagtcgacccattcgatctacatgttcttcaataccagcgagcttagagaagcggtccccgagccggtacttttgtccagagcggagctgcggttgctcaggctcaagctgaaagtggaacagcacgtagagctttatcagaagtacagcaacaattcatggcggtatctctcgaaccggctgttggcgccgtcggattcacccgaatggctcagctttgatgtcacgggggtggtgcgccagtggttgtccaggggcggagagatcgaaggatttcggctctcagcccactgttcgtgtgatagcagggacaacacgctccaagtagatatcaacggattcactactggtcgcagaggggatcttgcgacaatccacggtatgaatcgcccttttctcctgctgatggccacaccccttgaacgggcgcaacatcttcagtcatcccgccataggagagcactggacacgaactactgtttttcgtcgacagagaagaattgctgcgtgcggcagctttacatcgacttccgaaaagatctcgggtggaaatggattcatgaaccgaaggggtatcacgccaacttctgcctgggtccgtgtccttatatctggtcgttggatacacagtattcaaaggtgttggctctttacaatcagcacaacccgggagcctcggctgcgccttgttgcgtaccccaggcattggagccattgccgattgtgtattatgtgggaagaaagccgaaagtggagcagttgtcgaatatgatcgtacggagctgcaaatgctcctgataagctgccttctgcggggcttgccttctggccatgcccttcttctctcccttgcacctgtacctcttggtctttgaataaagcctgagtaggaag

SEQ ID NO: 251448 - RNA, 806 nt, synthetic construct
  misc_feature 1..806: note = Description of Artificial Sequence: Synthetic transcript sequence
  source 1..806: mol_type = other RNA
gggaaataagagagaaaagaagagtaagaagaaatataagagccaccatgggtgtaaggcacccgccctgctcccacagactcctggcggtgtgtgccttggtatcgcttgcgaccgccgcactgcttgtcaatccgggggtagtcgtgcgcatcagccagaagggactggattacgcctcgcagcagggtaccgcggcacttcagaaagagcttaagcggatcaagattccagactattcagatagctttaagatcaagcatttgggaaaaggtcactattcgttttactcgatggacattagagaattccagctcccttcgtcccaaatttccatggtcccgaatgtggggctgaaattcagcatttcgaacgcgaacatcaagatctcagggaaatggaaggcacagaagcgatttctcaaaatgtcaggaaactttgatctctccatcgaggggatgtcaatctcggcggacttgaaactcggctccaatcctacatcgggaaagcccactattacggcctcgtcgtgttcgagccatatcaactcggtgcacgtccatatctcaaagtccaaagtaggatggcttatccagctcttccacaaaaagattgagtcggctttgcgcaacaagatgaatagccaagtgtgcgagaaagtcacaaattccgtgtcatcagaattgcagccctacttccaaacgctgtaatgagctgccttctgcggggcttgccttctggccatgcccttcttctctcccttgcacctgtacctcttggtctttgaataaagcctgagtaggaag

SEQ ID NO: 251449 - RNA, 1573 nt, synthetic construct
  misc_feature 1..1573: note = Description of Artificial Sequence: Synthetic transcript sequence
  source 1..1573: mol_type = other RNA
gggaaataagagagaaaagaagagtaagaagaaatataagagccaccatggtatccaagggggaggaggacaacatggcgatcatcaaggagttcatgcgattcaaggtgcacatggaaggttcggtcaacggacacgaatttgaaatcgaaggagagggtgaaggaaggccctatgaagggacacagaccgcgaaactcaaggtcacgaaagggggaccacttcctttcgcctgggacattctttcgccccagtttatgtacgggtccaaagcatatgtgaagcatcccgccgatattcctgactatctgaaactcagctttcccgagggattcaagtgggagcgggtcatgaactttgaggacgggggtgtagtcaccgtaacccaagactcaagcctccaagacggcgagttcatctacaaggtcaaactgcgggggactaactttccgtcggatgggccggtgatgcagaagaaaacgatgggatgggaagcgtcatcggagaggatgtacccagaagatggtgcattgaagggggagatcaagcagagactgaagttgaaagatgggggacattatgatgccgaggtgaaaacgacatacaaagcgaaaaagccggtgcagcttcccggagcgtataatgtgaatatcaagttggatattacttcacacaatgaggactacacaattgtcgaacagtacgaacgcgctgagggtagacactcgacgggaggcatggacgagttgtacaaaggaagcggagctactaacttcagcctgctgaagcaggctggagacgtggaggagaaccctggacctatggtgtccaagggtgaggaattgtttaccggggtggtgcctattctcgtcgaacttgacggggatgtgaatggacacaagttttcggtatccggagaaggagagggtgacgccacatacggaaagcttacactcaaattcatctgtacgacggggaaactgcccgtaccctggcctacgctcgtaaccacgctgacttatggagtgcagtgctttagcagataccccgaccatatgaagcagcacgacttcttcaagtcggcgatgcccgaggggtacgtgcaagagaggaccattttcttcaaagacgatggcaattacaaaacacgcgcagaagtcaagtttgagggcgatactctggtcaatcggatcgaattgaagggaatcgatttcaaagaagatggaaacatccttggccataagctcgagtacaactataactcgcataatgtctatatcatggctgacaagcagaaaaacggtatcaaagtcaactttaagatccgacacaatattgaggacggttcggtgcagcttgcggaccactatcaacagaatacgccgattggggatggtccggtccttttgccggataaccattatctctcaacccagtcagccctgagcaaagatccaaacgagaagagggaccacatggtcttgctcgaattcgtgacagcggcagggatcactctgggaatggacgagttgtacaagtgataatggtctttgaataaagcctgagtaggaag

SEQ ID NO: 251450 - RNA, 1568 nt, synthetic construct
  misc_feature 1..1568: note = Description of Artificial Sequence: Synthetic transcript sequence
  source 1..1568: mol_type = other RNA
gggaaataagagagaaaagaagagtaagaagaaatataagagccaccatggccgtgatggcgccgcggaccctggtcctcctgctgtcgggcgccctcgccctgacgcagacctgggccgaggtgcagctggtcgagagcggcgggggcctcgtgcagccgggcgggtcgctgcggctgagctgcgccgcgagcgggttcaacatcaaggacacctacatccactgggtgcgccaggcccccggcaagggcctcgagtgggtcgcccggatctaccccacgaacgggtacacccgctacgccgacagcgtgaagggccggttcaccatcagcgcggacacctcgaagaacacggcctacctgcagatgaacagcctgcgcgccgaggacaccgccgtgtactactgcagccggtggggcggcgacgggttctacgccatggactactgggggcagggcaccctcgtcaccgtgagcagcgcgtcgacgaaggggcccagcgtgttcccgctggcccccagcagcaagagcaccagcggcgggaccgccgccctgggctgcctcgtcaaggactacttccccgagcccgtgaccgtgtcgtggaacagcggcgcgctgacgagcggggtccacaccttcccggccgtgctgcagagcagcggcctctactcgctgagcagcgtggtcaccgtgcccagcagcagcctggggacccagacgtacatctgcaacgtgaaccacaagccctcgaacaccaaggtcgacaagaaggtggagcccaagagctgcgacaagacccacacctgcccgccctgccccgcccccgagctcctgggcgggcccagcgtgttcctgttcccgcccaagcccaaggacacgctcatgatcagccgcacccccgaggtcacctgcgtggtggtcgacgtgagccacgaggaccccgaggtgaagttcaactggtacgtcgacggcgtggaggtgcacaacgccaagaccaagccgcgggaggagcagtacaactcgacgtaccgcgtcgtgagcgtgctgaccgtcctgcaccaggactggctcaacggcaaggagtacaagtgcaaggtgagcaacaaggccctgcccgcgcccatcgagaagaccatcagcaaggccaaggggcagccccgggagccgcaggtgtacaccctgccccccagccgcgacgagctcacgaagaaccaggtcagcctgacctgcctggtgaagggcttctacccctcggacatcgccgtggagtgggagagcaacgggcagccggagaacaactacaagaccaccccgcccgtcctcgacagcgacggcagcttcttcctgtacagcaagctgacggtggacaagtcgcggtggcagcagggcaacgtgttcagctgcagcgtcatgcacgaggccctccacaaccactacacccagaagagcctgagcctgagccccgggtgataataggctgccttctgcggggcttgccttctggccatgcccttcttctctcccttgcacctgtacctcttggtctttgaataaagcctgagtaggaag

SEQ ID NO: 251451 - RNA, 863 nt, synthetic construct
  misc_feature 1..863: note = Description of Artificial Sequence: Synthetic transcript sequence
  source 1..863: mol_type = other RNA
gggaaataagagagaaaagaagagtaagaagaaatataagagccaccatggccgtgatggcgccgcggaccctggtcctcctgctgtcgggcgccctcgccctgacgcagacctgggccgacatccagatgacccagagcccgtcgagcctgagcgccagcgtgggcgaccgggtcacgatcacctgccgcgcgagccaggacgtgaacaccgccgtggcctggtaccagcagaagcccgggaaggcccccaagctcctgatctactcggcgagcttcctgtacagcggcgtccccagccggttcagcgggtcgcgcagcggcaccgacttcacgctcaccatcagcagcctgcagccggaggacttcgccacctactactgccagcagcactacaccacgccccccaccttcgggcagggcaccaaggtggagatcaagcggaccgtggccgcccccagcgtcttcatcttcccgcccagcgacgagcagctgaagtcgggcacggccagcgtggtgtgcctcctgaacaacttctacccccgcgaggcgaaggtccagtggaaggtggacaacgccctgcagagcgggaacagccaggagagcgtgaccgagcaggactcgaaggacagcacctacagcctcagcagcaccctgacgctgagcaaggccgactacgagaagcacaaggtctacgcctgcgaggtgacccaccaggggctctcgagccccgtgaccaagagcttcaaccggggcgagtgctgataataggctgccttctgcggggcttgccttctggccatgcccttcttctctcccttgcacctgtacctcttggtctttgaataaagcctgagtaggaag
